(19) United States
(12) Patent Application Publication
(10) Pub. No.: US 2012/0100549 A1
(43) Pub. Date: Apr. 26, 2012

(54) TARGETED GENOME AMPLIFICATION METHODS

(75) Inventors: Mark Eshoo, Solana Beach, CA (US); Christopher Crowder, San Marcos, CA (US); John Picuri, Carlsbad, CA (US); Neill White, Temecula, CA (US); Megan A. Rounds, Carlsbad, CA (US)

(73) Assignee: IBIS BIOSCIENCES, INC., Carlsbad, CA (US)

(21) Appl. No.: 13/250,173

(22) Filed: Sep. 30, 2011

Related U.S. Application Data
(60) Provisional application No. 61/388,985, filed on Oct. 1, 2010.
(60) Provisional application No. 61/428,652, filed on Dec. 30, 2010.

(51) Int. Cl. C12Q 1/68

(52) U.S. Cl. 435/6.12

(57) ABSTRACT

The methods disclosed herein relate to methods and compositions for amplifying nucleic acid sequences, more specifically, from nucleic acid sequences of pathogens by targeted genome amplification. In certain embodiments, multiple primer pairs are employed that flank a target region and polymerization is conducted with a strand displacing enzyme.

[0001] The present Application claims priority to U.S. Provisional Application Ser. No. 61/388,985 filed Oct. 1, 2010, and U.S. Provisional Application Ser. No. 61/428,652 filed Dec. 30, 2010, the entirety of each of which is herein incorporated by reference.

### STATEMENT REGARDING FEDERALLY SPONSORED RESEARCH OR DEVELOPMENT

[0002] This invention was made in part with Government support under Grant Number 1-07-C-0096 awarded by HDTRA, and under Grant Numbers WHIXWH-05-C-0116 and NBCHC 070041 awarded by DHS. The Government has certain rights in the invention.

### SEQUENCE LISTING

[0003] The instant application contains a Sequence Listing which has been submitted in ASCII format via EFS-Web and is hereby incorporated by reference in its entirety. Said ASCII copy, created on Oct. 26, 2011, is named 10133W001.txt and is 588,586 bytes in size.

### FIELD OF THE INVENTION

[0004] The present invention relates to methods and compositions for targeted genome amplification. In certain embodiments, multiple primer pairs are employed that flank a target region and polymerization is conducted with a strand displacing enzyme.

### BACKGROUND OF THE INVENTION

[0005] In many fields of research such as genetic diagnosis, cancer research or forensic medicine, the scarcity of genomic DNA can be a severely limiting factor on the type and quantity of genetic tests that can be performed on a sample. One approach designed to overcome this problem is whole genome amplification. The objective is to amplify a limited DNA sample in a non-specific manner in order to generate a new sample that is indistinguishable from the original but with a higher DNA concentration. The aim of a typical whole genome amplification technique would be to amplify a sample up to a microgram level while respecting the original sequence representation.

[0006] The first whole genome amplification methods were described in 1992, and were based on the principles of the polymerase chain reaction. Zhang and coworkers (Zhang, L., et al. Proc. Natl. Acad. Sci. USA, 1992, 89: 5847-5851) developed the primer extension PCR technique (PEP) and Telenius and collaborators (Telenius et al., Genomics. 1992, 13(3):718-25) designed the degenerate oligonucleotide-primed PCR method (DOP-PCR) Zhang et al., 1992). PEP involves a high number of PCR cycles; using Taq polymerase and 15 base random primers that anneal at a low stringency temperature. Although the PEP protocol has been improved in different ways, it still results in incomplete genome coverage, failing to amplify certain sequences such as repeats. Failure to prime and amplify regions containing repeats may lead to incomplete representation of a whole genome because consistent primer coverage across the length of the genome provides for optimal representation of the genome. This method also has limited efficiency on very small samples (such as single cells). Moreover, the use of Taq polymerase implies that the maximal product length is about 3 kb.

[0007] DOP-PCR is a method which uses Taq polymerase and semi-degenerate oligonucleotides (such as CGACTCGAGNNNNATGTGG (SEQ ID NO: 1), for example, where N=A, T, C or G) that bind at a low annealing temperature at approximately one million sites within the human genome. The first cycles are followed by a large number of cycles with a higher annealing temperature, allowing only for the amplification of the fragments that were tagged in the first step. This leads to incomplete representation of a whole genome. DOP-PCR generates, like PEP, fragments that are in average 400-500 bp, with a maximum size of 3 kb, although fragments up to 10 kb have been reported. On the other hand, as noted for PEP, a low input of genomic DNA (less than 1 ng) decreases the fidelity and the genome coverage (Kittler et al., Anal. Biochem. 2002, 300(2), 237-44).

[0008] Multiple displacement amplification (MDA, also known as strand displacement amplification; SDA) is a non-PCR-based isothermal method based on the annealing of random hexamers to denatured DNA, followed by strand-displacement synthesis at constant temperature (Blanco et al., 1989, J. Biol. Chem. 264:8935-40). It has been applied to small genomic DNA samples, leading to the synthesis of high molecular weight DNA with limited sequence representation bias (Lizardi et al., Nature Genetics 1998, 19, 225-232; Dean et al., Proc. Natl. Acad. Sci. U.S.A. 2002, 99, 5261-5266). As DNA is synthesized by strand displacement, a gradually increasing number of priming events occur, forming a network of hyper-branched DNA structures. The reaction can be catalyzed by the Phi29 DNA polymerase or by the large fragment of the Bst DNA polymerase. The Phi29 DNA polymerase possesses a proofreading activity resulting in error rates 100 times lower than the Taq polymerase.

[0009] The methods described above generally produce amplification of whole genomes wherein all of the nucleic acid in a given sample is indiscriminately amplified. These methods cannot selectively amplify target genomes in the presence of background or contaminating genomes. Therefore, the results obtained from these methods have a problematically high amount of contaminating background nucleic acid. Purifying collected samples to isolate target genome(s) and remove background genome(s) will result in a further reduction in the amount of already scarce target genome.

[0010] There is a long felt need for a method of targeted amplification of a whole genome relative to background or contaminating genomes. In certain cases where only small quantities of a nucleic acid sample to be tested for the presence of a given target nucleic acid sequence, it would be advantageous to introduce specificity into amplification of whole genomes so that a particular target genome is selectively amplified relative to other genomes present within a given sample. For example, in cases of microbial forensics or clinical diagnostics, it would be useful to selectively amplify a genome of a pathogen, or a class of pathogens relative to the genomes of organisms which are also present in the sample which contains a small quantity of total nucleic acid. This would provide the quantities of nucleic acid of the pathogen that are necessary to identify the pathogen. The methods disclosed herein satisfy this long felt need.

### SUMMARY OF THE INVENTION

[0011] In certain embodiments, the present invention provides methods of amplifying a target sequence (e.g., from a pathogen) comprising contacting: a) a sample with a strand displacing polymerase, a first upstream primer, a second upstream primer, a first downstream primer, and a second downstream primer, wherein the sample is suspected of containing a nucleic acid sequence comprising a target region sequence, wherein the first and second upstream primers are able to hybridize to the nucleic acid sequence upstream of the target region sequence, and wherein the first and second downstream primers are able to hybridize to the nucleic acid sequence downstream of the target region sequence; and b) treating same sample under conditions such that: i) a first upstream amplicon is generated comprising the first upstream primer and said target region sequence, ii) a second upstream amplicon is generated that comprises the second upstream primer, the sequence of the first upstream primer, and the target region sequence, wherein the first upstream amplicon is strand displaced by the strand displacing enzyme during the generation of the second upstream amplicon; iii) a first downstream amplicon is generated comprising the first downstream primer and the target region sequence, and iv) a second downstream amplicon is generated that comprises the second downstream primer, the sequence of the first downstream primer, and the target region sequence, wherein the first downstream amplicon is strand displaced by the strand displacing enzyme during the generation of the second downstream amplicon.

[0012] In some embodiments, the methods further comprise detecting the presence or absence of the first upstream amplicon, the second upstream amplicon, the first downstream amplicon, the second downstream amplicon, or any combination thereof (e.g., by PCR detection methods). In some embodiments, the treating is incubating the sample under isothermal conditions. In some embodiments, the strand displacing polymerase is a polymerase such as Phi 29, Klenow polymerase, or Bst polymerase. In some embodiments, the strand displacing polymerase is Bst polymerase.

[0013] In some embodiments, the sample is a biological sample, an environmental sample, a synthetic sample, or a manufactured sample. In some embodiments, the sample is a biological sample such as blood, serum, plasma, tissue, cells, saliva, sputum, urine, cerebrospinal fluid, pleural fluid, milk, tears, stool, sweat, semen, whole cells, cell constituent, cell smear, or extracts thereof. In some embodiments, the target sequence is present in a spirochete genome. In some embodiments, the spirochete is a member of the genus Borrelia.

[0014] In some embodiments, the sample is contacted with at least 3 . . . at least 10 . . . at least 24 . . . or at least 40 upstream primers and at least 3 . . . at least 10 . . . at least 24 . . . or at least 40 downstream primers. In some embodiments, the sample is contacted with at least 50 upstream primers and 50 downstream primers. In some embodiments, the average Tₘ of the primers is in the range of 35-60° C. In some embodiments, the displaced strand of the first upstream amplicon functions as template for amplification by a downstream primer. In some embodiments, the displaced strand of the first downstream amplicon functions as template for amplification by an upstream primer.

[0015] In some embodiments, the amplicons are detected using a method such as a PCR method, a mass spectrometry method, or a sequencing method. In some embodiments, the present invention provides a kit for use in conducting methods described herein, the kit comprising at least two upstream primers (e.g., 2 . . . 5 . . . 10 . . . 50 . . . or more), two downstream primers (e.g., 2 . . . 5 . . . 10 . . . 50 . . . or more), and a strand-displacing polymerase. In certain embodiments, the present invention provides a method of amplifying a target sequence comprising: a) contacting a sample with a strand displacing polymerase, at least two upstream primers, and at least two downstream primers, wherein the sample is suspected of containing a nucleic acid sequence comprising a target region, wherein the at least two upstream primers hybridize to the nucleic acid sequence upstream of the target region, and wherein the at least two downstream primers hybridize to the nucleic acid sequence downstream of the target region; and b) treating same sample under conditions such that amplicons are generated from the at least two upstream primer and from the at least two downstream primers.

[0016] In some embodiments, the at least two upstream primers comprises at least 3 . . . at least 5 . . . at least 25 . . . or more upstream primers and wherein the at least two downstream primers comprises at least 3 . . . at least 5 . . . at least 25 . . . or more downstream primers. In some embodiments, the strand displacing polymerase is a polymerase such as Phi 29, Klenow polymerase, or Bst polymerase.

[0017] Provided herein is an oligonucleotide that is selected by identifying each oligonucleotide of x nucleotides in length that appears in a target genome, where x may be 5-100. A first ratio is calculated by dividing the number of times each oligonucleotide appears in the target genome by the length of the genome in nucleotides. A second ratio or ratios is calculated by dividing the number of times each oligonucloetide appears in one or more background genomes by the length of each respective background genome in nucleotides. The second ratios for each oligonucleotide are summed and divided by the number of background genomes. A combined hit ratio for each oligonucleotide is determined by calculating a ratio of the first ratio to the averaged second ratios. The oligonucleotides are ranked into a list by one or more criteria, which may be by descending order according to the respective combined hit ratio of the oligonucleotides. The oligonucleotide may be selected from the ranked list. The oligonucleotide may be one of the top 600-ranked oligonucleotides from the ranked list, or may be the highest ranked. The oligonucleotide may have a combined hit ratio of at least 5, 10, 20, or 50. Also provided herein is a plurality of oligonucleotides, wherein the oligonucleotides may consist of 2-600 of the ranked oligonucleotides.

[0018] Further provided herein is a method for isolating a target genome by providing a sample suspected of comprising the target genome and contacting the sample with the probe. Also provided herein is a method for detecting a target genome by providing a sample suspected of comprising the target genome and contacting the sample with the probe. The presence of bound probe is detected, and the presence of bound probe indicates the presence of the target genome. The method may also comprise performing DNA amplification and detecting the presence of the amplification product, where the presence of the amplified product indicates the presence of the target genome. The sample may comprise a background sequence. The amplification product may consist of a sequence that is contained in a virulence factor gene.

[0019] Also provided herein is an oligonucleotide set comprising a plurality of oligonucleotides selected by identifying each oligonucleotide of x nucleotides in length that appears in a target genome, where x may be 5-100. A first ratio is calculated by dividing the number of times each oligonucleotide appears in the target genome by the length of the genome in nucleotides. A second ratio or ratios is calculated by dividing the number of times each oligonucloetide appears in one or more background genomes by the length of each respective background genome in nucleotides. The second ratios for each oligonucleotide are summed and divided by the number of background genomes. A combined hit ratio for each oligonucleotide is determined by calculating a ratio of the first ratio to the averaged second ratios. The oligonucleotides are ranked into a list by one or more criteria, which may be by descending order according to the respective combined hit ratio of the oligonucleotides. A set of oligonucleotides is then generated by an iterative process, which starts with selecting an oligonucleotide from the ranked list with the highest rank and that binds to the target genome at least y times, where y is 0 to 500. It is then determined whether the selected oligonucleotide binds to the target genome within the largest remaining gap in target genome coverage left by oligonucleotides in the primer set. If the oligonucleotide does bind to the target genome within the largest remaining gap in target genome coverage left by the oligonucleotides in the primer set, then the oligonucleotide is added to the primer set. If the oligonucleotide does not bind to the target genome within the largest remaining gap in target genome coverage left by the oligonucleotides in the primer set, then the oligonucleotide is omitted and discarded from the ranked list. The iterative process is repeated 100-600 times. The method for generating the oligonucleotide set may further comprise repeating the iterative process z times to generate z different primer sets, where z is 0-500, and for each iteration, increasing y by 1, and then selecting one of the z primer sets that optimizes the average combined hit ratio for the oligonucleotides in the set and the maximum distance between oligonucleotides of the oligonucleotide set on the target genome.

[0020] The oligonucleotide set may be used for targeted whole or partial genome amplification. The background genomes may comprise a human genome, a human mitochondrial genome, a plant genome, or a plant chloroplast genome. The oligonucleotides in the oligonucleotide set may have a combined hit ratio of at least 5, 10, 20 or 50.

[0021] Further provided herein is a method of amplifying a target genome by contacting the target genome with the oligonucleotide set and performing DNA amplification. Also provided herein is a method of detecting a pathogen in a patient suspected of being infected by the pathogen by providing a sample isolated from the patient, contacting the sample with the oligonucleotide set, performing DNA amplification, and detecting the presence of the amplification product, where the presence of the amplification product is indicative of the presence of the pathogen. The pathogen may be Borrelia.

[0022] Further provided herein is a probe comprising an insert, wherein the insert consists of the sequence of the oligonucleotide selected from the ranked list or from the oligonucleotide set. The probe may be embedded in a gel, which may be a synchronous coefficient of drag alteration (SCODA) method gel. The probe may be attached to a microarray or HPLC. The probe may be a real-time probe, a scorpion probe, a hybridization probe, a 5′-nuclease probe, a molecular beacon probe, or a FISH probe. The oligonucleotide may be selected to identify a part of the genome encoding a virulence factor.

[0023] Also provided herein is a kit for performing targeted genome amplification that includes the oligonucleotide set and instructions for using the kit. Further provided herein is a method for detecting the presence of a target genome by providing a sample suspected of containing a target genome that comprises a target sequence, isolating the target genome from a background genome, contacting the target genome with two or more oligonucleotides from the oligonucleotide set, performing DNA amplification and detecting the presence of the amplification product. The presence of the amplification product indicates the presence of the target genome. The isolating may be accomplished by contacting the genome with the SCODA method gel and separating the target genome from the background genome. The amplification product may consist of a sequence that is contained in a virulence factor gene. Further provided herein is a computer system for generating the list of ranked oligonucleotides that includes a process and a memory coupled to the processor. The memory may be configured to store instructions for performing the steps of the method for generating the oligonucleotide set, where the instructions are executed by the processor.

### BRIEF DESCRIPTION OF THE DRAWINGS

[0024] FIG. 1 is a plot indicating the relationships between sensitivity, selectivity and length of the genome sequence segments and primers hybridizing thereto.

[0025] FIG. 2 is a process diagram indicating the process steps for selection of genome sequence segments and primers hybridizing thereto.

[0026] FIG. 3A is a plot indicating the quantities of human DNA obtained from whole genome amplification (WGA) reactions performed with random hexamer primers (solid diamond) and the targeted whole genome amplification (TWGA) method using the primers of Table 3 (clear circle).

[0027] FIG. 3B is a plot indicating the quantity of Bacillus anthracis DNA obtained from whole genome amplification (WGA) reactions performed with random hexamer primers (solid diamond) and targeted whole genome amplification (TWGA) method using the primers of Table 3 (clear circle).

[0028] FIG. 4A is a plot indicating the quantities of human DNA obtained from whole genome amplification (WGA) reactions performed with random hexamer primers (solid diamond) and the targeted whole genome amplification (TWGA) method using the first generation primers of Table 3 (clear circle) and the second generation primers of Table 4 (clear square).

[0029] FIG. 4B is a plot indicating the quantity of Bacillus anthracis DNA obtained from whole genome amplification (WGA) reactions performed with random hexamer primers (solid diamond) and targeted whole genome amplification (TWGA) method using the primers of Table 3 (clear circle) and the second generation primers of Table 4 (clear square).

[0030] FIGS. 5A and 5B are plots indicating the quantities of Bacillus anthracis DNA (target genome) and Homo sapiens DNA (background genome) obtained in targeted whole genome amplification reactions with the indicated quantity of background DNA and 200 femtograms (fg) of Bacillus anthracis DNA.

[0031] FIGS. 6A and 6B are plots comparing the quantities of Bacillus anthracis DNA (target genome) and Homo sapiens DNA (background genome) obtained in a targeted whole genome amplification reaction (FIG. 6A) vs. a conventional whole genome amplification reaction (FIG. 6B).

[0032] FIGS. 7A and 7B are plots of quantity of amplified DNA obtained in a range of concentrations of Bacillus anthracis DNA (target genome) with a constant concentration of Homo sapiens DNA (background genome). FIG. 7A indicates the quantities of Bacillus anthracis DNA obtained in two different targeted whole genome amplification reactions and in a conventional whole genome amplification reaction. FIG. 7B indicates the quantities of Homo sapiens DNA in the same three reactions.

[0033] FIG. 8 is a process diagram illustrating a representative primer pair selection process.

[0034] FIG. 9 is a process diagram illustrating an embodiment of the calibration method.

[0035] FIG. 10 shows the results of targeted genome amplification of Borrelia DNA.

[0036] FIG. 11 shows the results of temperature optimization of targeted genome amplification of Borrelia DNA.

[0037] FIG. 12 shows the results of incubation time optimization of targeted genome amplification of Borrelia DNA.

[0038] FIG. 13 shows the sensitivity of targeted genome amplification of Borrelia DNA.

[0039] FIG. 14 is a simplified block diagram of a computer system described herein.

[0040] FIG. 15 shows a diagrammatic overview of an embodiment of the present invention using multiple primers and a strand displacing polymerase. Primers are designed to bind flanking the target region (A). As each primer extends a complementary DNA strand is created (B). Since a strand displacement polymerase is used, as a primer upstream creates a strand of DNA it displaces the adjacent downstream strand. This displaced strand can function as a new template for primers in the opposite direction to bind and prime.

[0041] FIG. 16 shows specific amplification of K. pneumoniae genome target DNA. DNA extracted from 200 μl human blood was spiked with 20 copies of K. pneumoniae genome, either subjected to TGA amplification or unamplified, followed by quantitative PCR (qPCR) to quantify the K. pneumoniae (16S locus) or Homo sapiens (Hs) Alu regions. TGA reaction amplified the K. pneumoniae 16S region over 25-fold, despite a 6,000,000-fold excess of human DNA.

[0042] FIG. 17 shows amplification of K. pneumoniae genome 149-fold (primer extension pair A) or 66-fold (primer extension pair B), respectively. DNA extracted from 200 μl human blood was spiked with 20 copies of K. pneumoniae genome, either subjected to TGA amplification or unamplified, followed by T5000 quantification.

[0043] FIG. 18 shows that no K. pneumoniae genome target DNA (16S or 23S loci) was detected by ESI-MS analysis of reaction components.

[0044] FIG. 19 shows the results of testing additional TGA primer sets to detect B. burgdorferi genome target DNA. Fifty copies of B. burgdorferi genome were added to 200 μl of human DNA extracted from 1 ml blood. The indicated primer sets were used at indicated concentrations for TGA, where the TGA incubation was conducted for 4 hours at their indicated annealing temperature, followed by incubation at 80° C. for 20 minutes and hold at 4° C. Two microliters of each TGA reaction was analyzed by ESI-MS. All primer sets were directed towards target 3511.

[0045] FIG. 20 shows the results of testing additional TGA primer sets to detect B. burgdorferi genome target DNA. Fifty copies of B. burgdorferi genome were added to 200 μl of human DNA extracted from 1 ml blood. The indicated primer sets were used at indicated concentrations for TGA, where the TGA incubation was conducted for 4 hours at their indicated annealing temperature, followed by incubation at 80° C. for 20 minutes and hold at 4° C. Five microliters of each TGA reaction was analyzed by ESI-MS. Primer sets directed towards loci 3517, 3514, or 3511 were used, respectively. Primer set “E3 mix” included 25 pairs of forward and reverse primers for each locus covering all three loci (75 primer pairs total, or 150 individual primers). Primer set “3p mix” includes the original “E set” primers (12 forward and 13 reverse primers for each of loci 3517, 3514, and 3511, for a total of 75 primers.)

[0046] FIG. 21 shows the results of testing additional TGA primer sets to detect B. burgdorferi genome target DNA. Thirty copies of B. burgdorferi genome were added to 200 μl of human DNA extracted from 1 ml blood. The indicated primer sets were used at indicated concentrations for TGA, where the TGA incubation was conducted for 4 hours at 56° C., followed by incubation at 80° C. for 20 minutes and hold at 4° C. Samples were treated with calf intestinal phosphatase (CIP), then 5 μA of each sample was loaded per well of a Borrelia MLST (multi-locus sequence typing) genotyping plate, cycled on an Eppendorf procycler thermocycler, and analyzed on a PlexID unit. Primer set “E3 mix” included 25 pairs of forward and reverse primers for each locus covering all three loci (75 primer pairs total, or 150 individual primers). Primer set “8E3” includes the “E3 set” primers, plus additional primers covering loci 3519-20, 3516, 3515, and 3518, where the 3519-20 primers covered two loci in total (loci 3519 and 3520), allowing the 8E3 primer set to cover eight loci altogether. Accordingly, the 8E3 primer set included the E3 set (12 forward and 13 reverse primers for each of loci 3517, 3514, and 3511, for a total of 75 primers) as well as 25 primer sets (25 forward primers and 25 reverse primers) for each of 3519-20, 3516, 3515, and 3518 (a total of 200 new primers).

### DETAILED DESCRIPTION

[0047] In certain embodiments, the present invention provides methods for amplifying trace amounts of specific DNA targets in samples that contain large amounts of other DNA. In general, these methods revolves around using multiple oligonucleotide primers flanking the target sequence in an isothermal nested amplification reaction.

[0048] As shown in the Examples below, the use of this method has been demonstrated by amplifying trace amounts of broad range 16s and 23s DNA targets and specific Borrelia DNA targets in samples containing large amounts of human DNA. Primers were designed to selectively amplify 16s and 23s targets of bacterial genomes as well as different regions of Borrelia DNA to increase the total copies for PCR detection. The PCR product was then subjected to ESI-MS for the detection of the 16s and 23s DNA targets or Borrelia DNA targets.

[0049] Many DNA targets for PCR detection are at extremely low copies and in the presence of other DNA targets. By selectively increasing the number of target DNA, the detection sensitivity of PCR can be increased without increasing background. The Examples below using 16s and 23s DNA targets are important because even during a significant septic infection, the number of bacterial genome copies in blood can be extremely low making detection of the pathogen unreliable. Using the TGA methods described herein, one can selectively increase the amount of 16s and 23s DNA allowing for reliable detection of the bacteria in isolates with trace samples of bacterial DNA.

[0050] The Example below using Borrelia is important because even in patients during the acute phase of Lyme disease the number of spirochetes in the blood is extremely low making PCR detection of the pathogen unreliable. Using the TGA methods of the present invention, one is able to selectively increase the amount of Borrelia allowing for reliable detection of Borrelia in isolates with trace samples of Borrelia DNA.

[0051] One advantage of the methods of the present invention is that they allow for the detection of very trace amounts of the target DNA even when they are in the presence of a large amount of background DNA. For example in bacterial infections when the amount of bacteria in the blood is low the methods allow for the selective amplification of the bacterial target even in the presence of human DNA from the blood.

[0052] Since the methods of the present invention are selective in their amplification, they have advantages over whole genome amplification (WGA) strategies as WGA amplifies all of the DNA present increasing the background DNA along with the target of interest DNA. For example, one of the advantages of embodiments of the methods of the present invention is by selectively amplifying 16s, 23, or Borrelia DNA one can reliably detect the 16s, 23s, or Borrelia DNA even when it is in trace amounts and in the presence of overwhelming amounts of other DNA such as in a blood sample. A reliable PCR test for 16s, 23s, or Borrelia targets can provide quick and accurate detection of the pathogen in samples where it was previously too low to detect.

[0053] The inventors have made the surprising discovery that whole or parts of target genomes, such as microbial genomes, can be selectively amplified from a mixture of target and background DNA, such as host nuclear DNA and host mitochondrial DNA. This amplification can be accomplished by using oligonucleotide sets that include fewer oligonucleotides that preferentially bind to sequences that are highly repeated throughout the target genome, but appear only rarely in the background DNA. The oligonucleotides are selected to maximize the number of locations in the target genome to which they can bind in proportion to the target genome size, as compared to the average of the number of locations within the background DNAs in proportion to the respective background DNAs. Accordingly, the oligonucleotides of the oligonucleotide set are chosen to have a high degree of selectivity for the target genome in comparison to background DNA. The oligonucleotides of the oligonucleotide set are further selected in order to balance high target genome selectivity with providing the greatest amount of target genome coverage, with as short a distance between oligonucleotide binding sites in the target genome as possible.

[0054] Particular oligonucleotides can be further selected from the oligonucleotide sets for amplifying only specific regions of interest within the target genome, rather than the entire genome. Such oligonucleotides are more sensitive than oligonucleotides known in the art, because oligonucleotides from the oligonucleotide set are more selective for the target genome as compared to the background genomes. For example, the particular oligonucleotides can be used to amplify a gene that encodes for a virulence factor of a pathogen containing the target genome.

[0055] Thus, the targeted partial and whole genome oligonucleotide sets disclosed herein are designed to be far more sensitive than other known techniques; the oligonucleotide sets are capable of amplifying target microbial genomic DNA that is present in very small quantities in comparison to background host DNAs. The amounts of target DNA that can be detected using the instantly disclosed oligonucleotide sets approach the limits of detection for targets, for example, ten bacteria in 1 mL of blood. The instantly disclosed oligonucleotide sets generally only need to include 100-600 different primers of approximately 7-12 nucleotides in length, although other lengths are possible. Fewer oligonucleotides, and as few as two, are used for partial target genome amplification.

[0056] In addition, the oligonucleotides of the oligonucleotide sets disclosed herein can be used as capture probes for isolating a target genome from a sample that may also contain the background genome(s). The oligonucleotides of the oligonucleotide set are more selective for the target genome as compared to other capture probes known in the art.

### 1. DEFINITIONS

[0057] The terminology used herein is for the purpose of describing particular embodiments only and is not intended to be limiting. As used in the specification and the appended claims, the singular forms “a,” “an” and “the” include plural referents unless the context clearly dictates otherwise.

[0058] For recitation of numeric ranges herein, each intervening number is explicitly contemplated with the same degree of precision. For example, for the range of 6-9, the numbers 7 and 8 are contemplated in addition to 6 and 9, and for the range 6.0-7.0, the numbers 6.0, 6.1, 6.2, 6.3, 6.4, 6.5, 6.6, 6.7, 6.8, 6.9, and 7.0 are explicitly contemplated.

[0059] As used herein, the term “abundance” refers to an amount. The amount may be described in terms of concentration, which are common in molecular biology such as “copy number” “pfu or plate-forming unit,” and are well known to those with ordinary skill. Concentration may be relative to a known standard or may be absolute.

[0060] The term “amplification,” as used herein, refers to a process of multiplying an original quantity of a nucleic acid template in order to obtain greater quantities of the original nucleic acid.

[0061] As used herein, the term “amplifiable nucleic acid” is used in reference to nucleic acids that may be amplified by any amplification method. It is contemplated that “amplifiable nucleic acid” also applies to the term “sample template.”

[0062] As used herein, the term “amplification reagents” refers to those reagents (deoxyribonucleotide triphosphates, buffer, etc.), needed for amplification, excluding primers, nucleic acid template, and the amplification enzyme. Typically, amplification reagents along with other reaction components are placed and contained in a reaction vessel (test tube, micro-well, or other vessel).

[0063] As used herein, the term “analogous” when used in context of comparison of bioagent identifying amplicons indicates that the bioagent identifying amplicons being compared are produced with the same pair of primers. For example, bioagent identifying amplicon “A” and bioagent identifying amplicon “B”, produced with the same pair of primers are analogous with respect to each other. Bioagent identifying amplicon “C”, produced with a different pair of primers is not analogous to either bioagent identifying amplicon “A” or bioagent identifying amplicon “B”.

[0064] As used herein, the term “anion exchange functional group” refers to a positively charged functional group capable of binding an anion through an electrostatic interaction. The most well known anion exchange functional groups are the amines, including primary, secondary, tertiary and quaternary amines.

[0065] The term “background organisms,” as used herein, refers to organisms typically present in a given sample that are not of interest and are thus considered to be contaminants. The background organism may be a pathogen, a virus, a bacterium, a protozoan, or a multicellular organism such as a fungus, plant, algae, or animal, or any other kind of bioagent.

[0066] The term “background genome,” as used herein refers to the DNA of a background organism, such as the genome of the organism. Background organisms will vary according to the sample source. In a non-limiting example, for targeted genome amplification of a soil bioremediation bacterium in a soil sample, it would be advantageous to define the genomes of organisms native to soil such as C. elegans, as background genomes. In another non-limiting example, for whole genome amplification of a genome belonging to a target pathogen in a human tissue sample, it would be advantageous to define human nuclear DNA, and optionally human mitochondrial DNA, as a background genome. The background genome may be a plasmid. The background genome may also be an organellar genome such as that of a mitochondrion or chloroplasts.

[0067] The term “bacteria” or “bacterium” refers to any member of the groups of eubacteria and archaebacteria.

[0068] The term “bacteremia” refers to the presence of bacteria in the bloodstream. It is also known by the related terms “blood poisoning” or “toxemia.” In the hospital, indwelling catheters are a frequent cause of bacteremia and subsequent nosocomial infections, because they provide a means by which bacteria normally found on the skin can enter the bloodstream. Other causes of bacteremia include dental procedures (occasionally including simple tooth brushing), herpes (including herpetic whitlow), urinary tract infections, intravenous drug use, and colorectal cancer. Bacteremia may also be seen in oropharyngeal, gastrointestinal or genitourinary surgery or exploration.

[0069] As used herein, a “base composition” is the exact number of each nucleobase (for example, A, T, C and G) in a segment of nucleic acid. For example, amplification of nucleic acid of strain 5170 of Mycobacterium tuberculosis using primer pair number 3550 (SEQ ID NOs: 673:697) produces an amplification product 129 nucleobases in length from nucleic acid of the embB gene that has a base composition of A21 G37 C44 T27 (by convention—with reference to the sense strand of the amplification product). Because the molecular masses of each of the four natural nucleotides and chemical modifications thereof are known (if applicable), a measured molecular mass can be deconvoluted to a list of possible base compositions. Identification of a base composition of a sense strand which is complementary to the corresponding antisense strand in terms of base composition provides a confirmation of the true base composition of an unknown amplification product. For example, the base composition of the antisense strand of the 129 nucleobase amplification product described above is A27 G44 C37 T21.

[0070] As used herein, a “base composition probability cloud” is a representation of the diversity in base composition resulting from a variation in sequence that occurs among different isolates of a given species. The “base composition probability cloud” represents the base composition constraints for each species and is typically visualized using a pseudo four-dimensional plot.

[0071] As used herein, a “bioagent” is any organism, cell, or virus, living or dead, or a nucleic acid derived from such an organism, cell or virus. The bioagent may contain a target genome or a background genome. Examples of bioagents include, but are not limited, to cells, (including but not limited to human clinical samples, bacterial cells and other pathogens), viruses, fungi, protists, parasites, and pathogenicity markers (including but not limited to: pathogenicity islands, antibiotic resistance genes, virulence factors, toxin genes and other bioregulating compounds). Samples may be alive or dead or in a vegetative state (for example, vegetative bacteria or spores) and may be encapsulated or bioengineered. As used herein, a “pathogen” is a bioagent which causes a disease or disorder. A pathogen that infects a human is known as a “human pathogen.” Non-human pathogens may infect specific animals but not humans. Human pathogens are of interest for clinical reasons and non-human pathogen identification is of interest in veterinary applications of the methods disclosed herein.

[0072] As used herein, a “bioagent division” is defined as group of bioagents above the species level and includes but is not limited to, orders, families, classes, clades, genera or other such groupings of bioagents above the species level.

[0073] As used herein, the term “bioagent identifying amplicon” refers to a polynucleotide that is amplified from nucleic acid of a bioagent in an amplification reaction and which 1) provides sufficient variability to distinguish among bioagents from whose nucleic acid the bioagent identifying amplicon is produced and 2) whose molecular mass is amenable to a rapid and convenient molecular mass determination modality such as mass spectrometry, for example. In silico representations of bioagent identifying amplicons are particularly useful for inclusion in databases used for identification of bioagents. Bioagent identifying amplicons are defined by a pair of primers that hybridize to regions of nucleic acid of a given bioagent. The bioagent identifying amplicon may be unique to a bioagent containing a target genome. A bioagent containing a target genome may be distinguishable from a bioagent containing a background genome.

[0074] As used herein, the term “biological product” refers to any product originating from an organism. Biological products are often products of processes of biotechnology. Examples of biological products include, but are not limited to: cultured cell lines, cellular components, antibodies, proteins and other cell-derived biomolecules, growth media, growth harvest fluids, natural products and bio-pharmaceutical products.

[0075] The terms “biowarfare agent” and “bioweapon” are synonymous and refer to a bacterium, virus, fungus or protozoan that could be deployed as a weapon to cause bodily harm to individuals. Military or terrorist groups may be implicated in deployment of biowarfare agents. As used herein, the term “broad range survey primer pair” refers to a primer pair designed to produce bioagent identifying amplicons across different broad groupings of bioagents. For example, the ribosomal RNA-targeted primer pairs are broad range survey primer pairs which have the capability of producing bacterial bioagent identifying amplicons for essentially all known bacteria. With respect to broad range primer pairs employed for identification of bacteria, a broad range survey primer pair for bacteria such as 16S rRNA primer pair number 346 (SEQ ID NOs: 594:602) for example, will produce an bacterial bioagent identifying amplicon for essentially all known bacteria. The broad range survey primer pair may bind to target genome sequence segments within the target genomes of the broad grouping of bioagents.

[0076] The term “calibration amplicon” refers to a nucleic acid segment representing an amplification product obtained by amplification of a calibration sequence with a pair of primers designed to produce a bioagent identifying amplicon.

[0077] The term “calibration sequence” refers to a polynucleotide sequence to which a given pair of primers hybridizes for the purpose of producing an internal (i.e., included in the reaction) calibration standard amplification product for use in determining the quantity of a bioagent in a sample. The calibration sequence may be expressly added to an amplification reaction, or may already be present in the sample prior to analysis.

[0078] The term “Glade primer pair” refers to a primer pair designed to produce bioagent identifying amplicons for species belonging to a Glade group. A Glade primer pair may also be considered as a “speciating” primer pair which is useful for distinguishing among closely related species.

[0079] The term “codon” refers to a set of three adjoined nucleotides (triplet) that codes for an amino acid or a termination signal.

[0080] As used herein, the term “codon base composition analysis,” refers to determination of the base composition of an individual codon by obtaining a bioagent identifying amplicon that includes the codon. The bioagent identifying amplicon will at least include regions of the target nucleic acid sequence to which the primers hybridize for generation of the bioagent identifying amplicon as well as the codon being analyzed, located between the two primer hybridization regions.

[0081] As used herein, the terms “complementary” or “complementarity” are used in reference to polynucleotides (i.e., a sequence of nucleotides such as an oligonucleotide or a target nucleic acid) related by the base-pairing rules. For example, the sequence 5′-A-G-T-3′, is complementary to the sequence 3′-T-C-A-5′. Complementarity may be “partial,” in which only some of the nucleic acids' bases are matched according to the base pairing rules. Or, there may be “complete” or “total” complementarity between the nucleic acids. The degree of complementarity between nucleic acid strands has significant effects on the efficiency and strength of hybridization between nucleic acid strands. This is of particular importance in amplification reactions, as well as detection methods which depend upon binding between nucleic acids. Either term may also be used in reference to individual nucleotides, especially within the context of polynucleotides. For example, a particular nucleotide within an oligonucleotide may be noted for its complementarity, or lack thereof, to a nucleotide within another nucleic acid strand, in contrast or comparison to the complementarity between the rest of the oligonucleotide and the nucleic acid strand. But in this sense, complementarity either exists or does not exist i.e.: there is no partial complementarity.

[0082] The term “complement of a nucleic acid sequence” as used herein refers to an oligonucleotide which, when aligned with the nucleic acid sequence such that the 5′ end of one sequence is paired with the 3′ end of the other, is in “antiparallel association.” Certain bases not commonly found in natural nucleic acids may be included in the nucleic acids disclosed herein and include, for example, inosine and 7-deazaguanine Complementarity need not be perfect; stable duplexes may contain mismatched base pairs or unmatched bases. Those skilled in the art of nucleic acid technology can determine duplex stability empirically considering a number of variables including, for example, the length of the oligonucleotide, base composition and sequence of the oligonucleotide, ionic strength and incidence of mismatched base pairs. Where a first oligonucleotide is complementary to a region of a target nucleic acid and a second oligonucleotide has complementary to the same region (or a portion of this region) a “region of overlap” exists along the target nucleic acid. The degree of overlap will vary depending upon the extent of the complementarity.

[0083] The term “degenerate primers,” as used herein refers to a mixture of similar, but not identical, primers having one or more residues substituted relative to the other primer(s) in the mixture. Degenerate nucleotide codes include R, K, S, Y, M, W, B, H, N, D, V and I. The corresponding combinations are listed in 37 CFR §1.821. For example, the sequence AAATTTRCCCGGG (SEQ ID NO: 2) actually refers to a combination of primers having the following sequences: AAATTTACCCGGG (SEQ ID NO: 3), and AAATTTGCCCGGG (SEQ ID NO: 4) because R=A or G.

[0084] As used herein, the term “division-wide primer pair” refers to a primer pair designed to produce bioagent identifying amplicons within sections of a broader spectrum of bioagents. The division-wide primer pair may bind to target genome sequence segments within target genomes of the broader spectrum of bioagents. For example, primer pair number 354 (SEQ ID NOs: 597:605), a division-wide primer pair, is designed to produce bacterial bioagent identifying amplicons for members of the Bacillus group of bacteria which comprises, for example, members of the genera Streptococcus, Enterococcus, and Staphylococcus. Other division-wide primer pairs may be used to produce bacterial bioagent identifying amplicons for other groups of bacterial bioagents.

[0085] As used herein, the term “concurrently amplifying” used with respect to more than one amplification reaction refers to the act of simultaneously amplifying more than one nucleic acid in a single reaction mixture.

[0086] As used herein, the term “drill-down primer pair” refers to a primer pair designed to produce bioagent identifying amplicons for identification of sub-species characteristics or confirmation of a species assignment. For example, primer pair number 897 (SEQ ID NOs: 717:727), a drill-down Staphylococcus aureus genotyping primer pair, is designed to produce Staphylococcus aureus genotyping amplicons. Other drill-down primer pairs may be used to produce bioagent identifying amplicons for Staphylococcus aureus and other bacterial species. The term “duplex” refers to the state of nucleic acids in which the base portions of the nucleotides on one strand are bound through hydrogen bonding to their complementary bases arrayed on a second strand. The condition of being in a duplex form reflects on the state of the bases of a nucleic acid. By virtue of base pairing, the strands of nucleic acid also generally assume the tertiary structure of a double helix, having a major and a minor groove. The assumption of the helical form is implicit in the act of becoming duplexed.

[0087] As used herein, the term “etiology” refers to the causes or origins, of diseases or abnormal physiological conditions.

[0088] The term “frequency of occurrence” as used herein, refers to the number of different coordinates where a given genome sequence segment occurs within a given genome. The frequency of occurrence of a given genome sequence segment provides a means of defining the sensitivity of a primer designed to hybridize to the genome sequence segment. The frequency of occurrence of a given genome sequence segment is also used in the calculation of selectivity ratios, hit ratios, and combined hit ratios.

[0089] The term “gene” refers to a DNA sequence that comprises control and coding sequences necessary for the production of an RNA having a non-coding function (e.g., a ribosomal or transfer RNA), a polypeptide or a precursor. The RNA or polypeptide can be encoded by a full length coding sequence or by any portion of the coding sequence so long as the desired activity or function is retained.

[0090] The term “genome,” as used herein, generally refers to the complete set of genetic information in the form of one or more nucleic acid sequences, including text or in silico representations thereof. A genome may include either DNA or RNA, depending upon its organism of origin. Most organisms have DNA genomes while some viruses have RNA genomes. As used herein, the term “genome” need not comprise the complete set of genetic information. The term may also refer to at least a majority portion of a genome such as at least 50% to 100% of an entire genome or any whole or fractional percentage therebetween. The term genome may also refer to part of a genome. For example, the genome may be a chromosome, or a portion of a chromosome. The genome may also not be a contiguous segment of DNA. The genome may be a number of regions with a common characteristic, such as including coding regions that encode similar types of products, or such as including RNA genes. For example, the genome may be portions that contain ribosome-producing sequences. The part of the genome may be targeted in order to detect a particular genome or to make a diagnosis, such as of an infection by a pathogen.

[0091] The term “genome sequence segment,” as used herein, refers to a portion of a genome sequence which is initially defined as a primer hybridization candidate for the purpose of the targeted genome amplification methods disclosed herein. The genome sequence segment may be 7, 8, 9, 10, 11, 12, 13, 14, 15, 16, 17, 18, 19, 20, 21, 22, 23, 24, 25, 26, 27, 28, 29, 30, 31, 32, 33, 34, 35, 36, 37, 38, 39, 40, 41, 42, 43, 44, 45, 46, 47, 48, 49, 50, 51, 52, 53, 54, 55, 56, 57, 58, 59, 60, 61, 62, 63, 64, 65, 66, 67, 68, 69, 70, 71, 72, 73, 74, 75, 76, 77, 78, 79, 80, 81, 82, 83, 84, 85, 86, 87, 88, 89, 90, 91, 92, 93, 94, 95, 96, 97, 98, 99, or 100 nucleotides in length. The related term “unique genome sequence segment” refers to a genome sequence segment that occurs at least once in a given genome. For example, a simplified hypothetical 8 nucleobase genome consisting of the following sequence: aattccgg (SEQ ID NO: 5) has four unique genome sequence segments of five nucleobase lengths (aattc (SEQ ID NO: 6); attcc (SEQ ID NO: 7); ttccg (SEQ ID NO: 8); and tccgg (SEQ ID NO: 9)). This same simplified hypothetical 8 nucleobase genome also has three unique genome sequence segments of six nucleobase lengths: (aattcc (SEQ ID NO: 10); attccg (SEQ ID NO: 11); and ttccgg (SEQ ID NO: 12)). This same simplified hypothetical 8 nucleobase genome also has two unique genome sequence segments of seven nucleobase lengths: (aattccg (SEQ ID NO: 13); and attccgg (SEQ ID NO: 14)). This same simplified hypothetical 8 nucleobase genome also has one unique genome sequence segment which is 8 nucleobases in length: (aattccgg (SEQ ID NO: 5). In another example, a simplified hypothetical 8 nucleobase genome consisting of the following sequence: aaaaaaaa (SEQ ID NO: 15) obviously only has a single unique genome sequence segment which is five nucleobases in length (occurring 4 times), as well as a single unique genome sequence segment which is six nucleobases in length (occurring 3 times), a single unique genome sequence segment which is seven nucleobases in length (occurring twice) and a single unique genome sequence segment which is eight nucleobases in length (occurring once).

[0092] The term “genotype,” as used herein, refers to the genetic makeup of an organism. Members of the same species of organism having genetic differences are said to have different genotypes.

[0093] The term “hit ratio” as used herein, refers to a variable calculated by determining the frequency of occurrence of a given genome sequence segment within the target genome divided by the length of the given genome, and then dividing this by the frequency of occurrence of the given genome sequence segment in a background genome divided by the length of the background genome. For example, if there is one target genome (A) and one background genome (B), and the frequency of occurrence for the given genome sequence segment is 1 in A and B, the hit ratio would be calculated as follows:

(1(A)/length of genome A)/(1(B)/length of genome B)

[0094] If the hit ratio is being calculated for a target genome that is less than an entire genome, such as a chromosome or a portion of a chromosome, then the frequency of occurrence of a given genome sequence segment would be determined for the chromosome or portion of the chromosome. The frequency of occurrence would then be divided by the length of the chromosome or portion of the chromosome. Additionally, the remainder of the genome that is not included in the target genome becomes a background genome for determining the hit ratio. The hit ratio would otherwise be calculated as above.

[0095] Similarly, when there is more than one background genome, a “combined hit ratio” can be calculated. The term “combined hit ratio” as used herein, refers to a variable calculated by determining the frequency of occurrence of a given genome sequence segment within the target genome divided by the length of the target genome, and then dividing this by the average of the frequency of occurrence of the given genome sequence segment within each background genome divided by the length of the respective background genome. For example, if there is one target genome (A) and two background genomes (B and C, respectively), such as nuclear genomic DNA (B) and mitochondrial DNA (C), and the frequency of occurrence for the given genome sequence segment is 1 in A, B, and C, then the combined hit ratio would be calculated as follows:

(1(A)/length of genome A)/((1(B)/length of genome B)+(1(C)/length of genome C)/2)

[0096] If the combined hit ratio is being determined for a target genome that does not include an entire genome, such as a chromosome or a portion of a chromosome, then the frequency of occurrence of a given genome sequence segment would be determined for the chromosome or portion of the chromosome. The frequency of occurrence would then be divided by the length of the chromosome or portion of the chromosome. Additionally, the remainder of the genome that is not included in the target genome becomes a background genome for determining the combined hit ratio. The combined hit ratio would otherwise be calculated as above. The combined hit ratio may be 1, 2, 3, 4, 5, 6, 7, 8, 9, 10, 11, 12, 13, 14, 15, 16, 17, 18, 19, 20, 21, 22, 23, 24, 25, 26, 27, 28, 29, 30, 31, 32, 33, 34, 35, 36, 37, 38, 39, 40, 41, 42, 43, 44, 45, 46, 47, 48, 49, 50, or greater.

[0097] The terms “homology,” “homologous” and “sequence identity” refer to a degree of identity. There may be partial homology or complete homology. A partially homologous sequence is one that is less than 100% identical to another sequence. Determination of sequence identity is described in the following example: a primer 20 nucleobases in length which is otherwise identical to another 20 nucleobase primer but having two non-identical residues has 18 of 20 identical residues (18/20=0.9 or 90% sequence identity). In another example, a primer 15 nucleobases in length having all residues identical to a 15 nucleobase segment of a primer nucleobases in length would have 15/20=0.75 or 75% sequence identity with the 20 nucleobase primer. As used herein, sequence identity is meant to be properly determined when the query sequence and the subject sequence are both described and aligned in the 5′ to 3′ direction. Sequence alignment algorithms such as BLAST, will return results in two different alignment orientations. In the Plus/Plus orientation, both the query sequence and the subject sequence are aligned in the 5′ to 3′ direction. On the other hand, in the Plus/Minus orientation, the query sequence is in the 5′ to 3′ direction while the subject sequence is in the 3′ to 5′ direction. It should be understood that with respect to the primers disclosed herein, sequence identity is properly determined when the alignment is designated as Plus/Plus. Sequence identity may also encompass alternate or modified nucleobases that perform in a functionally similar manner to the regular nucleobases adenine, thymine, guanine and cytosine with respect to hybridization and primer extension in amplification reactions. In a non-limiting example, if the 5-propynyl pyrimidines propyne C and/or propyne T replace one or more C or T residues in one primer which is otherwise identical to another primer in sequence and length, the two primers will have 100% sequence identity with each other. In another non-limiting example, Inosine (I) may be used as a replacement for G or T and effectively hybridize to C, A or U (uracil). Thus, if inosine replaces one or more C, A or U residues in one primer which is otherwise identical to another primer in sequence and length, the two primers will have 100% sequence identity with each other. Other such modified or universal bases may exist which would perform in a functionally similar manner for hybridization and amplification reactions and will be understood to fall within this definition of sequence identity.

[0098] As used herein, “housekeeping gene” refers to a gene encoding a protein or RNA involved in basic functions required for survival and reproduction of a bioagent. Housekeeping genes include, but are not limited to genes encoding RNA or proteins involved in translation, replication, recombination and repair, transcription, nucleotide metabolism, amino acid metabolism, lipid metabolism, energy generation, uptake, secretion and the like.

[0099] The term “hybridization,” as used herein refers to the process of joining two complementary strands of DNA or one each of DNA and RNA to form a double-stranded molecule.

[0100] The term “in silico” refers to processes taking place via computer calculations. For example, electronic PCR (ePCR) is a process analogous to ordinary PCR except that it is carried out using nucleic acid sequences and primer pair sequences stored on a computer formatted medium.

[0101] The term “in vitro method,” as used herein, describes a biochemical process performed in a test-tube or other laboratory apparatus. An amplification reaction performed on a nucleic acid sample in a microtube or a well of a multi-well plate is an example of an in vitro method. The “ligase chain reaction” (LCR; sometimes referred to as “Ligase Amplification Reaction” (LAR) described by Barany, Proc. Natl. Acad. Sci., 88:189 (1991); Barany, PCR Methods and Applic., 1:5 (1991); and Wu and Wallace, Genomics 4:560 (1989) has developed into a well-recognized alternative method for amplifying nucleic acids. In LCR, four oligonucleotides, two adjacent oligonucleotides which uniquely hybridize to one strand of target DNA, and a complementary set of adjacent oligonucleotides, that hybridize to the opposite strand are mixed and DNA ligase is added to the mixture. Provided that there is complete complementarity at the junction, ligase will covalently link each set of hybridized molecules. Importantly, in LCR, two probes are ligated together only when they base-pair with sequences in the target sample, without gaps or mismatches. Repeated cycles of denaturation, hybridization and ligation amplify a short segment of DNA. LCR has also been used in combination with PCR to achieve enhanced detection of single-base changes. However, because the four oligonucleotides used in this assay can pair to form two short ligatable fragments, there is the potential for the generation of target-independent background signal. The use of LCR for mutant screening is limited to the examination of specific nucleic acid positions.

[0102] The term “locked nucleic acid” or “LNA” refers to a nucleic acid analogue containing one or more 2′-O, 4′-C-methylene-.beta.-D-ribofuranosyl nucleotide monomers in an RNA mimicking sugar conformation. LNA oligonucleotides display unprecedented hybridization affinity toward complementary single-stranded RNA and complementary single- or double-stranded DNA. LNA oligonucleotides induce A-type (RNA-like) duplex conformations. The primers disclosed herein may contain LNA modifications.

[0103] As used herein, the term “mass-modifying tag” refers to any modification to a given nucleotide which results in an increase in mass relative to the analogous non-mass modified nucleotide. Mass-modifying tags can include heavy isotopes of one or more elements included in the nucleotide such as carbon-13 for example. Other possible modifications include addition of substituents such as iodine or bromine at the 5 position of the nucleobase for example.

[0104] The term “mass spectrometry” refers to measurement of the mass of atoms or molecules. The molecules are first converted to ions, which are separated using electric or magnetic fields according to the ratio of their mass to electric charge. The measured masses are used to identity the molecules.

[0105] The term “mean” as used herein refers to the arithmetic average; the sum of the data divided by the sample size.

[0106] The term “microorganism” as used herein means an organism too small to be observed with the unaided eye and includes, but is not limited to bacteria, virus, protozoans, fungi; and ciliates.

[0107] The term “multi-drug resistant” or multiple-drug resistant” refers to a microorganism which is resistant to more than one of the antibiotics or antimicrobial agents used in the treatment of said microorganism.

[0108] The term “multiplex PCR” refers to a PCR reaction where more than one primer set is included in the reaction pool allowing 2 or more different DNA targets to be amplified by PCR in a single reaction tube.

[0109] The term “non-template tag” refers to a stretch of at least three guanine or cytosine nucleobases of a primer used to produce a bioagent identifying amplicon which are not complementary to the template. A non-template tag is incorporated into a primer for the purpose of increasing the primer-duplex stability of later cycles of amplification by incorporation of extra G-C pairs which each have one additional hydrogen bond relative to an A-T pair.

[0110] The term “nucleic acid sequence” as used herein refers to the linear composition of the nucleic acid residues A, T, C or G or any modifications thereof, within an oligonucleotide, nucleotide or polynucleotide, and fragments or portions thereof, and to DNA or RNA of genomic or synthetic origin which may be single or double stranded, and represent the sense or antisense strand

[0111] As used herein, the term “nucleobase” is synonymous with other terms in use in the art including “nucleotide,” “deoxynucleotide,” “nucleotide residue,” “deoxynucleotide residue,” “nucleotide triphosphate (NTP),” or deoxynucleotide triphosphate (dNTP).

[0112] The term “nucleotide analog” as used herein refers to modified or non-naturally occurring nucleotides such as 5-propynyl pyrimidines (i.e., 5-propynyl-dTTP and 5-propynyl-dTCP), 7-deaza purines (i.e., 7-deaza-dATP and 7-deaza-dGTP). Nucleotide analogs include base analogs and comprise modified forms of deoxyribonucleotides as well as ribonucleotides.

[0113] The term “oligonucleotide” as used herein is defined as a molecule comprising two or more deoxyribonucleotides or ribonucleotides, preferably at least 5 nucleotides, more preferably at least about 13 to 35 nucleotides. The exact size will depend on many factors, which in turn depend on the ultimate function or use of the oligonucleotide. The oligonucleotide may be generated in any manner, including chemical synthesis, DNA replication, reverse transcription, PCR, or a combination thereof. Because mononucleotides are reacted to make oligonucleotides in a manner such that the 5′ phosphate of one mononucleotide pentose ring is attached to the 3′ oxygen of its neighbor in one direction via a phosphodiester linkage, an end of an oligonucleotide is referred to as the “5′-end” if its 5′ phosphate is not linked to the 3′ oxygen of a mononucleotide pentose ring and as the “3′-end” if its 3′ oxygen is not linked to a 5′ phosphate of a subsequent mononucleotide pentose ring. As used herein, a nucleic acid sequence, even if internal to a larger oligonucleotide, also may be said to have 5′ and 3′ ends. A first region along a nucleic acid strand is said to be upstream of another region if the 3′ end of the first region is before the 5′ end of the second region when moving along a strand of nucleic acid in a 5′ to 3′ direction. All oligonucleotide primers disclosed herein are understood to be presented in the 5′ to 3′ direction when reading left to right. When two different, non-overlapping oligonucleotides anneal to different regions of the same linear complementary nucleic acid sequence, and the 3′ end of one oligonucleotide points towards the 5′ end of the other, the former may be called the “upstream” oligonucleotide and the latter the “downstream” oligonucleotide. Similarly, when two overlapping oligonucleotides are hybridized to the same linear complementary nucleic acid sequence, with the first oligonucleotide positioned such that its 5′ end is upstream of the 5′ end of the second oligonucleotide, and the 3′ end of the first oligonucleotide is upstream of the 3′ end of the second oligonucleotide, the first oligonucleotide may be called the “upstream” oligonucleotide and the second oligonucleotide may be called the “downstream” oligonucleotide.

[0114] The term “organism,” as used herein, refers to humans, animals, plants, protozoa, bacteria, fungi and viruses.

[0115] As used here, a “partial genome,” may refer to any portion of a genome that is less than 100%. The partial genome may be a particular chromosome, a plasmid, a gene cluster, a gene, or a polymorphic region, or any other portion of interest of a genome.

[0116] As used herein, a “pathogen” is a bioagent which causes a disease or disorder.

[0117] As used herein, the terms “PCR product,” “PCR fragment,” and “amplification product” refer to the resultant mixture of compounds after two or more cycles of the PCR steps of denaturation, annealing and extension are complete. These terms encompass the case where there has been amplification of one or more segments of one or more target sequences.

[0118] The term “peptide nucleic acid” (“PNA”) as used herein refers to a molecule comprising bases or base analogs such as would be found in natural nucleic acid, but attached to a peptide backbone rather than the sugar-phosphate backbone typical of nucleic acids. The attachment of the bases to the peptide is such as to allow the bases to base pair with complementary bases of nucleic acid in a manner similar to that of an oligonucleotide. These small molecules, also designated anti gene agents, stop transcript elongation by binding to their complementary strand of nucleic acid (Nielsen, et al. Anticancer Drug Des. 1993, 8, 53-63). The primers disclosed herein may comprise PNAs.

[0119] The term “polymerase” refers to an enzyme having the ability to synthesize a complementary strand of nucleic acid from a starting template nucleic acid strand and free dNTPs.

[0120] As used herein, the term “polymerase chain reaction” (“PCR”) refers to the method of K. B. Mullis U.S. Pat. Nos. 4,683,195, 4,683,202, and 4,965,188, the contents of which are incorporated by reference, that describe a method for increasing the concentration of a segment of a target sequence in a mixture of genomic DNA without cloning or purification. This process for amplifying the target sequence consists of introducing a large excess of two oligonucleotide primers to the DNA mixture containing the desired target sequence, followed by a precise sequence of thermal cycling in the presence of a DNA polymerase. The two primers are complementary to their respective strands of the double stranded target sequence. To effect amplification, the mixture is denatured and the primers then annealed to their complementary sequences within the target molecule. Following annealing, the primers are extended with a polymerase so as to form a new pair of complementary strands. The steps of denaturation, primer annealing, and polymerase extension can be repeated many times (i.e., denaturation, annealing and extension constitute one “cycle”; there can be numerous “cycles”) to obtain a high concentration of an amplified segment of the desired target sequence. The length of the amplified segment of the desired target sequence is determined by the relative positions of the primers with respect to each other, and therefore, this length is a controllable parameter. By virtue of the repeating aspect of the process, the method is referred to as the “polymerase chain reaction” (hereinafter “PCR”). Because the desired amplified segments of the target sequence become the predominant sequences (in terms of concentration) in the mixture, they are said to be “PCR amplified.” With PCR, it is possible to amplify a single copy of a specific target sequence in genomic DNA to a level detectable by several different methodologies (e.g., hybridization with a labeled probe; incorporation of biotinylated primers followed by avidin-enzyme conjugate detection; incorporation of ³²P-labeled deoxynucleotide triphosphates, such as dCTP or dATP, into the amplified segment). In addition to genomic DNA, any oligonucleotide or polynucleotide sequence can be amplified with the appropriate set of primer molecules. In particular, the amplified segments created by the PCR process itself are, themselves, efficient templates for subsequent PCR amplifications.

[0121] The term “polymerization means” or “polymerization agent” refers to any agent capable of facilitating the addition of nucleoside triphosphates to an oligonucleotide. Preferred polymerization means comprise DNA and RNA polymerases.

[0122] The term “primer,” as used herein refers to an oligonucleotide, whether occurring naturally as in a purified restriction digest or produced synthetically, which is capable of acting as a point of initiation of synthesis when placed under conditions in which synthesis of a primer extension product which is complementary to a nucleic acid strand is induced, (i.e., in the presence of nucleotides and an inducing agent such as DNA polymerase and at a suitable temperature and pH). The primer is preferably single stranded for maximum efficiency in amplification, but may alternatively be double stranded. If double stranded, the primer is first treated to separate its strands before being used to prepare extension products. The primer may be an oligodeoxyribonucleotide. The primer must be sufficiently long to prime the synthesis of extension products in the presence of the inducing agent. The exact lengths of the primers will depend on many factors, including temperature, source of primer, use of the method, and the parameters used for primer design, as disclosed herein. A primer may be less than 100% complementary to its corresponding original genome sequence segment. For example, the primer may be 70%, 75%, 80%, 85%, 90%, or 95% complementary to its corresponding original genome sequence segment.

[0123] As used herein, the terms “pair of primers,” or “primer pair” are synonymous. A primer pair is used for amplification of a nucleic acid sequence. A pair of primers comprises a forward primer and a reverse primer. The forward primer hybridizes to a sense strand of a target gene sequence to be amplified and primes synthesis of an antisense strand (complementary to the sense strand) using the target sequence as a template. A reverse primer hybridizes to the antisense strand of a target gene sequence to be amplified and primes synthesis of a sense strand (complementary to the antisense strand) using the target sequence as a template.

[0124] The primer pairs are designed to bind to highly conserved sequence regions of a bioagent identifying amplicon that flank an intervening variable region and yield amplification products which ideally provide enough variability to distinguish each individual bioagent, and which are amenable to molecular mass analysis. In some embodiments, the highly conserved sequence regions exhibit between about 80-100%, or between about 90-100%, or between about 95-100% identity, or between about 99-100% identity. The molecular mass of a given amplification product provides a means of identifying the bioagent from which it was obtained, due to the variability of the variable region. Thus design of the primers requires selection of a variable region with appropriate variability to resolve the identity of a given bioagent. Bioagent identifying amplicons are ideally specific to the identity of the bioagent.

[0125] Properties of the primers may include any number of properties related to structure including, but not limited to: nucleobase length which may be contiguous (linked together) or non-contiguous (for example, two or more contiguous segments which are joined by a linker or loop moiety), modified or universal nucleobases (used for specific purposes such as for example, increasing hybridization affinity, preventing non-templated adenylation and modifying molecular mass) percent complementarity to a given target sequences.

[0126] Properties of the primers also include functional features including, but not limited to, orientation of hybridization (forward or reverse) relative to a nucleic acid template. The coding or sense strand is the strand to which the forward priming primer hybridizes (forward priming orientation) while the reverse priming primer hybridizes to the non-coding or antisense strand (reverse priming orientation). The functional properties of a given primer pair also include the generic template nucleic acid to which the primer pair hybridizes. For example, in the case of primer pairs, identification of bioagents can be accomplished at different levels using primers suited to resolution of each individual level of identification. Broad range survey primers are designed with the objective of identifying a bioagent as a member of a particular division (e.g., an order, family, genus or other such grouping of bioagents above the species level of bioagents). In some embodiments, broad range survey intelligent primers are capable of identification of bioagents at the species or sub-species level. Other primers may have the functionality of producing bioagent identifying amplicons for members of a given taxonomic genus, lade, species, sub-species or genotype (including genetic variants which may include presence of virulence genes or antibiotic resistance genes or mutations). Additional functional properties of primer pairs include the functionality of performing amplification either singly (single primer pair per amplification reaction vessel) or in a multiplex fashion (multiple primer pairs and multiple amplification reactions within a single reaction vessel).

[0127] The term “processivity,” as used herein, refers to the ability of an enzyme to repetitively continue its catalytic function without dissociating from its substrate. For example, Phi29 polymerase is a highly processive polymerase due to its tight binding of the template DNA substrate.

[0128] As used herein, the terms “purified” or “substantially purified” refer to molecules, either nucleic or amino acid sequences, that are removed from their natural environment, isolated or separated, and are at least 60% free, preferably 75% free, and most preferably 90% free from other components with which they are naturally associated. An “isolated polynucleotide” or “isolated oligonucleotide” is therefore a substantially purified polynucleotide.

[0129] The term “reverse transcriptase” refers to an enzyme having the ability to transcribe DNA from an RNA template. This enzymatic activity is known as reverse transcriptase activity. Reverse transcriptase activity is desirable in order to obtain DNA from RNA viruses which can then be amplified and analyzed by the methods disclosed herein.

[0130] The term “ribosomal RNA” or “rRNA” refers to the primary ribonucleic acid constituent of ribosomes. Ribosomes are the protein-manufacturing organelles of cells and exist in the cytoplasm. Ribosomal RNAs are transcribed from the DNA genes encoding them.

[0131] The term “sample” in the present specification and claims is used in its broadest sense. On the one hand it is meant to include a specimen or culture (e.g., microbiological cultures). On the other hand, it is meant to include both biological and environmental samples. A sample may include a specimen of synthetic origin. Biological samples may be animal, including human, fluid, solid (e.g., stool) or tissue, as well as liquid and solid food and feed products and ingredients such as dairy items, vegetables, meat and meat by-products, and waste. Biological samples may be obtained from all of the various families of domestic animals, as well as feral or wild animals, including, but not limited to, such animals as ungulates, bear, fish, lagamorphs, rodents, etc. Environmental samples include environmental material such as surface matter, soil, water, air and industrial samples, as well as samples obtained from food and dairy processing instruments, apparatus, equipment, utensils, disposable and non-disposable items. These examples are not to be construed as limiting the sample types applicable to the methods disclosed herein. The term “source of target nucleic acid” refers to any sample that contains nucleic acids (RNA or DNA). Particularly preferred sources of nucleic acids are biological samples including, but not limited to blood, saliva, urine, cerebral spinal fluid, pleural fluid, milk, lymph, sputum and semen. In particular, different fractions of blood samples exist such as serum or plasma (the liquid component of blood which contains various vital proteins), and buffy coat (a centrifuged fraction of blood that contains white blood cells and platelets). Other preferred sources of nucleic acids are specific cell types such as, hepatic cells for example. Other preferred sources of nucleic acids are tissue biopsies. Methods of handing such samples are well within the technical skill of an ordinary practitioner in the art.

[0132] As used herein, the term “sample template” refers to nucleic acid originating from a sample that is analyzed for the presence of “target” (defined below). In contrast, “background template” is used in reference to nucleic acid other than sample template that may or may not be present in a sample. Background template is often a contaminant. It may be the result of carryover, or it may be due to the presence of nucleic acid contaminants sought to be purified away from the sample. For example, nucleic acids from organisms other than those to be detected may be present as background in a test sample.

[0133] A “segment” is defined herein as a region of nucleic acid within a nucleic acid sequence. The term “selectivity,” as used herein, is a measure which indicates the frequency of occurrence of a given genome sequence segment in a target relative to the frequency of occurrence of the same genome sequence segment in background genomes. The related term “selectivity ratio,” as used herein, is a number calculated by dividing the frequency of occurrence of a given genome sequence segment in a target genome by its frequency of occurrence in background genomes. Selectivity may also be measured as a hit ratio or combined hit ratio as described herein.

[0134] The “self-sustained sequence replication reaction” (3SR) (Guatelli et al., Proc. Natl. Acad. Sci. 1990, 87:1874-1878, with an erratum at Proc. Natl. Acad. Sci. 1990, 87:7797) is a transcription-based in vitro amplification system (Kwok et al., Proc. Natl. Acad. Sci. 1989, 86:1173-1177) that can exponentially amplify RNA sequences at a uniform temperature. The amplified RNA can then be utilized for mutation detection (Fahy et al., 1991, PCR Meth. Appl., 1:25-33). In this method, an oligonucleotide primer is used to add a phage RNA polymerase promoter to the 5′ end of the sequence of interest. In a cocktail of enzymes and substrates that includes a second primer, reverse transcriptase, RNase H, RNA polymerase and ribo- and deoxyribonucleoside triphosphates, the target sequence undergoes repeated rounds of transcription, cDNA synthesis and second-strand synthesis to amplify the area of interest. The use of 3SR to detect mutations is kinetically limited to screening small segments of DNA (e.g., 200-300 base pairs).

[0135] As used herein, the term “sequence alignment” refers to a listing of multiple DNA or amino acid sequences and aligns them to highlight their similarities. The listings can be made using bioinformatics computer programs.

[0136] The term “sensitivity,” as used herein, is a measure which indicates the frequency of occurrence of a given genome sequence segment within a target genome.

[0137] The term “separation distance,” as used herein, refers to the intervening distance along a given genome sequence between two genome sequence segments chosen as primer hybridization sites. For example, a first genome sequence segment having genome coordinates 100-107 and a second genome sequence segment having genome coordinates of 200-207 have a separation distance of 92 nucleobases (genome coordinates 108 to 199).

[0138] The term “sepsis,” as used herein, refers to a serious medical condition resulting from the immune response to a severe infection. The related term “septicemia” is a sepsis of the bloodstream caused by bacteremia (the presence of bacteria in the bloodstream). The associated term “sepsis-causing organisms” refers to organisms that are frequently found in the blood when in the state of sepsis. Although the majority of sepsis-causing organisms are bacteria, fungi have also been identified in the blood of individuals with sepsis.

[0139] As used herein, the term “speciating primer pair” refers to a primer pair designed to produce a bioagent identifying amplicon with the diagnostic capability of identifying species members of a group of genera or a particular genus of bioagents. Primer pair number 2249 (SEQ ID NOs: 601:609), for example, is a speciating primer pair used to distinguish Staphylococcus aureus from other species of the genus Staphylococcus.

[0140] The terms “stopping criterion” and “stopping criteria” refer to a chosen minimal acceptable criterion or criteria of collections of genome sequence segments for inclusion in the set of selected genome sequence segments to which primers will be designed. Examples of stopping criteria include, but are not limited to values reflecting mean separation distance or maximum separation distance. These stopping criteria can be chosen to act as the final step in a method for primer design of primers useful with targeted genome amplification.

[0141] As used herein, a “sub-species characteristic” is a genetic characteristic that provides the means to distinguish two members of the same bioagent species. For example, one viral strain could be distinguished from another viral strain of the same species by possessing a genetic change (e.g., for example, a nucleotide deletion, addition or substitution) in one of the viral genes, such as the RNA-dependent RNA polymerase. Sub-species characteristics such as virulence genes and drug-are responsible for the phenotypic differences among the different strains of bacteria.

[0142] The term “target genome,” as used herein, refers to a genome of interest acting as the subject of analysis of the methods disclosed herein. For example, it is desirable to produce large quantities of a “target genome” while minimizing production of “background genomes.”

[0143] The terms “threshold criterion” and “threshold criteria,” as used herein refer to values reflecting characteristics of genome sequence segments at which selections of sub-sets of genome sequence segments are made. For example, sub-sets of genome sequence segments can be chosen using a threshold criterion of a selectivity ratio at or above the mean selectivity ratio.

[0144] As used herein, the term “targeted whole genome amplification primers” refers to primers collected in a set which are useful for selectively amplifying one or more target genome relative to one or more background genomes. Targeted whole genome amplification primers are designed according methods disclosed herein.

[0145] As used herein, the term “target genome sequence segment” refers to a portion of specified length of a genome which is desired to be selectively bound relative to one or more background genomes. Primers are selected to hybridize as selectively as possible to target genome sequence segments while minimizing hybridization to one or more background genomes.

[0146] The term “template” refers to a strand of nucleic acid on which a complementary copy is built from nucleoside triphosphates through the activity of a template-dependent nucleic acid polymerase. Within a duplex the template strand is, by convention, depicted and described as the “bottom” strand. Similarly, the non-template strand is often depicted and described as the “top” strand.

[0147] The term “triangulation genotyping analysis” refers to a method of genotyping a bioagent by measurement of molecular masses or base compositions of amplification products, corresponding to bioagent identifying amplicons, obtained by amplification of regions of more than one gene. In this sense, the term “triangulation” refers to a method of establishing the accuracy of information by comparing three or more types of independent points of view bearing on the same findings. Triangulation genotyping analysis carried out with a plurality of triangulation genotyping analysis primers yields a plurality of base compositions that then provide a pattern or “barcode” from which a species type can be assigned. The species type may represent a previously known sub-species or strain, or may be a previously unknown strain having a specific and previously unobserved base composition barcode indicating the existence of a previously unknown genotype.

[0148] As used herein, the term “triangulation genotyping analysis primer pair” is a primer pair designed to produce bioagent identifying amplicons for determining species types in a triangulation genotyping analysis.

[0149] The employment of more than one bioagent identifying amplicon for identification of a bioagent is herein referred to as “triangulation identification.” Triangulation identification is pursued by analyzing a plurality of bioagent identifying amplicons produced with different primer pairs. This process is used to reduce false negative and false positive signals, and enable reconstruction of the origin of hybrid or otherwise engineered bioagents. For example, identification of the three part toxin genes typical of B. anthracis (Bowen et al., J. Appl. Microbiol., 1999, 87, 270-278) in the absence of the expected signatures from the B. anthracis genome would suggest a genetic engineering event.

[0150] As used herein, the term “unknown bioagent” may mean either: (i) a bioagent whose existence is known (such as the well known bacterial species Staphylococcus aureus for example) but which is not known to be in a sample to be analyzed, or (ii) a bioagent whose existence is not known (for example, the SARS coronavirus was unknown prior to April 2003). For example, if the method for identification of coronaviruses disclosed in commonly owned U.S. patent Ser. No. 10/829,826 (incorporated herein by reference in its entirety) was to be employed prior to April 2003 to identify the SARS coronavirus in a clinical sample, both meanings of “unknown” bioagent are applicable since the SARS coronavirus was unknown to science prior to April, 2003 and since it was not known what bioagent (in this case a coronavirus) was present in the sample. On the other hand, if the method of U.S. patent Ser. No. 10/829,826 was to be employed subsequent to April 2003 to identify the SARS coronavirus in a clinical sample, only the first meaning (i) of “unknown” bioagent would apply since the SARS coronavirus became known to science subsequent to April 2003 and since it was not known what bioagent was present in the sample.

[0151] The term “variable sequence” as used herein refers to differences in nucleic acid sequence between two nucleic acids. For example, the genes of two different bacterial species may vary in sequence by the presence of single base substitutions and/or deletions or insertions of one or more nucleotides. These two forms of the structural gene are said to vary in sequence from one another. As used herein, the term “viral nucleic acid” includes, but is not limited to, DNA, RNA, or DNA that has been obtained from viral RNA, such as, for example, by performing a reverse transcription reaction. Viral RNA can either be single-stranded (of positive or negative polarity) or double-stranded.

[0152] The term “virus” refers to obligate, ultramicroscopic, parasites that are incapable of autonomous replication (i.e., replication requires the use of the host cell's machinery). Viruses can survive outside of a host cell but cannot replicate.

[0153] The term “viremia” refers to a condition where viruses enter the bloodstream. It is similar to bacteremia, a condition where bacteria enter the bloodstream, and septicemia. Active viremia refers to the capability of the virus to replicate in blood. There are two types of viremia: primary viremia, which is the initial spread of virus in the blood; and secondary viremia, where the primary viremia has resulted in infection of additional tissues, in which the virus has replicated and once more entered the circulation.

[0154] The term “wild-type” refers to a gene or a gene product that has the characteristics of that gene or gene product when isolated from a naturally occurring source. A wild-type gene is that which is most frequently observed in a population and is thus arbitrarily designated the “normal” or “wild-type” form of the gene. In contrast, the term “modified”, “mutant” or “polymorphic” refers to a gene or gene product that displays modifications in sequence and or functional properties (i.e., altered characteristics) when compared to the wild-type gene or gene product. It is noted that naturally-occurring mutants can be isolated; these are identified by the fact that they have altered characteristics when compared to the wild-type gene or gene product. As used herein, a “wobble base” is a variation in a codon found at the third nucleotide position of a DNA triplet. Variations in conserved regions of sequence are often found at the third nucleotide position due to redundancy in the amino acid code.

[0155] As used herein, the term “strand-displacing polymerase” refers to a polymerase capable of displacing a downstream nucleic acid (e.g., DNA) strand encountered during synthesis. Examples of strand-displacing polymerases include, but are not limited to, Phi29 base, Klenow polymerase, Bsu polymerase, Bst polymerase, Pyrophage® polymerase (Lucigen Corp.), Vent® polymerase (New England Biolabs), Deep Vent® polymerase (New England Biolabs), DyNAzyme™ EXT DNA polymerase (New England Biolabs), and 9° Nₘ DNA polymerase (New England Biolabs).

### 2. TARGETED AMPLIFICATION AND DETECTION METHOD

[0156] Provided herein is a method for targeted genome amplification. The target genome amplification may be of a whole genome or of part of a genome.

[0157] a. Target Genome

[0158] The target genome may be the genome of a target organism, which may be a bacterium or protozoan. The target genome may also a plurality of target genomes. The choice of target genomes is dictated by the objective of the analysis. For example, if the desired outcome of the targeted amplification process is to obtain nucleic acid representing the genome of a biowarfare organism such as Bacillus anthracis, which is suspected of being present in a soil sample at the scene of a biowarfare attack, one may choose to select the genome of Bacillus anthracis as the one and only target genome. If, on the other hand, the desired outcome of the targeted genome amplification process is to obtain nucleic acid representing a group of bacteria, such as, a group of potential biowarfare agents, more than one target genome may be selected such as, a group comprising any or all of the following bacteria: Bacillus anthracis, Francisella tularensis, Yersinia pestis, Brucella sp., Burkholderia mallei, Rickettsia prowazekii, and Escherichia coli 0157. Likewise, a different genome or group of genomes could be selected as the target genome(s) for other purposes. For example, a human genome or mitochondrial DNA may be the target over common genomes found in a soil sample or other sample environments where a crime may have taken place. Thus, the current methods and compositions can be applied and the human genome (target) selectively amplified over the background genomes. Other examples could include the genomes of group of viruses that cause respiratory illness, pathogens that cause sepsis, or a group of fungi known to contaminate households.

[0159] (1) Partial Target Genome

[0160] A partial target genome may also be selectively amplified over a background genome. The partial target genome may be contained in the target genome of a target organism. The partial genome may be a chromosome or a portion of a chromosome. The partial target genome may also comprise one or more target genes or sequences of interest. The target genes or sequences may be indicative of the target organism. The target genes or sequences may also be indicative of a group of organisms, such as a strain, a sub-species, a species, a genus, or any other phylogenetic group. For example, the target gene may encode a virulence factor.

[0161] b. Background Genome

[0162] The background genome may be selected based on the likelihood of the nucleic acid of certain organisms being present. The background genome may be nuclear DNA or organellar DNA, such as mitochondrial or chloroplast DNA. The background genome may be a plurality of nuclear or organellar genomes. For example, a soil sample which was handled by a human would be expected to contain nucleic acid representing the genomes of organisms including, but not limited to: Homo sapiens, Gallus gallus, Guillardia theta, Oryza sativa, Arabidopsis thaliana, Yarrowia lipolytica, Saccharomyces cerevisiae, Debaryomyces hansenii, Kluyveromyces lactis, Schizosaccharmyces pom, Aspergillus fumigatus, Cryptococcus neoformans, Encephalitozoon cuniculi, Eremothecium gossypii, Candida glabrata, Apis mellifera, Drosophila melanogaster, Tribolium castaneum, Anopheles gambiae, and Caenorhabditis elegans. Any or all of these genomes are appropriate to estimate as background genomes in the sample. The organisms actually in any particular sample will vary for each sample based upon the source and/or environment. Therefore, background genomes may be selected based upon the identities of organisms actually present in the sample. The composition of a sample can be determined using any of a number of techniques known to those ordinarily skilled in the art. The primers may be designed based upon actual identification of one or more background organisms in the sample, and based upon likelihood of any further one or more background organisms being in the sample.

[0163] c. Identification of Unique Genome Sequence Segments as Primer Hybridization Sites

[0164] Once the target and background genomes of a sample are determined, the next step is to identify genome sequence segments within the target genome which are useful as primer hybridization sites. The efficiency of a given targeted genome amplification is dependent on effective use of primers. To produce an amplification product representative of the target genome, the primer hybridization sites should have appropriate separation across the length of the genome. The mean separation distance between the primer hybridization sites may be about 1000, 900, 800, 700, 600, 500, 400, 300, 200, 100, 90, 80, 70, 60, or 50 nucleobases in length or less.

[0165] One with ordinary skill in the art will recognize that effective priming for targeted genome amplification depends upon several factors such as the fidelity and processivity of the polymerase enzyme used for primer extension. A longer mean separation distance between primer hybridization sites becomes more acceptable if the polymerase enzyme has high processivity. This indicates that the polymerase binds tightly to the nucleic acid template. This is a desirable characteristic for targeted genome amplification because it enables the polymerase to remain bound to the template nucleic acid and continue to extend the complementary nucleic acid strand being synthesized. Examples of polymerase enzymes having high processivity include, but are not limited to Phi29 polymerase and Taq polymerase. Protein engineering strategies have been used to produce high processivity polymerase enzymes, for example, by covalent linkage of a polymerase to a DNA-binding protein (Wang et al., Nucl. Acids Res., 2004, 32(3) 1197-1207). As polymerases with improved processivity become available, longer mean separation distances, even greatly exceeding 1000 nucleobases may be acceptable for targeted genome amplification.

[0166] d. Hybridization Sensitivity and Selectivity

[0167] For the purpose of targeted genome amplification, the choice of length of the primer hybridization sites (genome sequence segments) and the lengths of the corresponding primers hybridizing thereto, preferably will balance two factors; (1) sensitivity, which indicates the frequency of binding of a given primer to the target genome, and (2) selectivity, which indicates the extent to which a given primer hybridizes to the target genome with greater frequency than it hybridizes to background genomes. Generally, longer primers tend toward greater selectivity and lesser sensitivity while the converse holds for shorter primers. The relationship between primer length, selectivity and sensitivity is graphically represented in FIG. 1. A primer may have a length of 5 to 100 nucleotides, and may be about 5 to about 13 nucleobases in length. The primer may have a length of 5, 6, 7, 8, 9, 10, 11, 12, 13, 14, 15, 16, 17, 18, 19, 20, 21, 22, 23, 24, 25, 26, 27, 28, 29, 30, 31, 32, 33, 34, 35, 36, 37, 38, 39, 40, 41, 42, 43, 44, 45, 46, 47, 48, 49, 50, 51, 52, 53, 54, 55, 56, 57, 58, 59, 60, 61, 62, 63, 64, 65, 66, 67, 68, 69, 70, 71, 72, 73, 74, 75, 76, 77, 78, 79, 80, 81, 82, 83, 84, 85, 86, 87, 88, 89, 90, 91, 92, 93, 94, 95, 96, 97, 98, 99, or 100 nucleotides. Primer size affects the balance between selectivity of the primer and sensitivity of the primer. Optimal primer length is determined for each sample with this balance in mind. Choosing a plurality of primers having various lengths provide broad priming across the target genome sequence(s) while also providing preferential binding of the primers to the target genome sequence(s) relative to the background genome sequences.

[0168] e. Selection Threshold Criteria

[0169] A suitable sub-set of the total unique genome sequence segments may be determined in order to reduce the total number of primers in the targeted genome amplification set in order to reduce the costs and complexity of the primer set. The sub-set may also include genome sequence segments that can be used to select primers that amplify a partial target genome, rather than the whole genome. Determination of the suitable sub-set of unique genome sequence segments may entail choosing one or more threshold criteria which indicate a useful and practical cut-off point for sensitivity and/or selectivity of a given genome sequence segment. Examples of such criteria include, but are not limited to, a selected threshold frequency of occurrence (a frequency of occurrence threshold value), or a selected selectivity ratio (a selectivity ratio threshold value), such as a combined hit ratio.

[0170] The total unique genome sequence segments may be ranked according to the criteria. For example, the total unique genome sequence segments may be ranked according to frequency of occurrence with the #1 rank indicating the greatest frequency of occurrence and the lowest rank indicating the lowest frequency of occurrence. A threshold frequency of occurrence can then be chosen from the ranks The threshold frequency of occurrence serves as the dividing line between members of the sub-set chosen for further analysis and the members that will not be further analyzed.

[0171] The total unique genome sequence segments may also be ranked according to combined hit ratio. For example, the total unique genome sequence segments are ranked according to combined hit ratio with the #1 rank indicating the greatest combined hit ratio and the lowest rank indicating the lowest combined hit ratio. A threshold frequency of occurrence can then be set in order to choose unique genome segments. An iterative process of choosing unique genome sequence segments can be used to pick a subset of unique genome sequence segments that includes a predetermined number of unique genome sequence segments. The iterative process includes a first step, in which the unique genome sequence segment is selected having the highest combined hit ratio and a frequency of occurrence equal to or greater than the frequency threshold. In the second step, it is determined whether the unique genome sequence segment breaks up the largest remaining gap in target genome coverage. If yes, the unique genome sequence segment is added to the subset. If not, the unique genome sequence segment is discarded. The two steps are repeated until the predetermined number of unique genome sequence segments has been selected. This iterative process of choosing subsets of unique genome sequence segments can itself be repeated to select a plurality of subsets. Each time the iterative process is repeated, a higher frequency threshold can be set to select unique genome sequence segments. The first frequency threshold may be set to 0, but may also be set to a higher threshold as appropriate.

[0172] Given a defined maximum allowable distance between primer binding sites (a parameter) and a maximum allowable number of primers in a set that we wish to consider (another parameter), the method will generate a unique, repeatable set of primers. For example, to generate a set of primers that preferentially amplify a particular target genome over a background genome, the maximum allowable distance between primers may set to 1000 bp, and the primer set may consist of less than 200 primers. If the 1000 bp max distance constraint can be satisfied by 17 primers, then no other primers need be selected. If, on the other hand, the iterative process reaches 200 primers and the 1000 bp criterion is still satisfied, then the iterative process is started over with the criterion that a primer must hit the target genome N times where N is initially 0, and incremented each time the 1000 bp constraint cannot be satisfied, until the constraint is satisfied.

[0173] This algorithm produces a series of subsets of unique genome sequence segments, each with a different minimum frequency of occurrence within the target genome. The selection of sets of unique genome sequence segments introduces a trade-off. Subsets that have a higher combined hit ratio tend to also have a higher maximum separation distance between unique genome sequence segments. This is because unique genome sequence segments with a high combined hit ratio tend to be longer, such as 11 or 12 nucleotides, and tend to have a low frequency of occurrence in the background genome. These unique genome sequence segments also tend to have a lower frequency of occurrence in the target genome, but they are more selective for the target genome. A desirable subset of unique genome sequence segments balances this trade-off. The most important variables in the balancing process are the average combined hit ratio and the maximum separation distance between unique genome sequence segments. It may be preferable to choose a subset that includes unique genome sequence segments with a high average combined hit ratio and also a small maximum separation distance. A maximum separation distance between the unique genome sequence segments of about 500 nucleotides may be desirable. For partial target genome amplification, the maximum separation distance between unique genome sequences segments may be about 400, or 300, or 200, 100, 90, 80, 70, 60, or 50 nucleotides. If the average combined hit ratio of a subset is poor, however, it may be preferable to select a subset of unique genome sequence segments with a higher maximum separation distance.

[0174] In a non-limiting example, the mean “frequency of occurrence” can be calculated from the frequency of occurrence of the total genome sequence segments and this mean frequency of occurrence can be selected as a threshold criterion. The “frequency of occurrence” is defined in the “Definitions” section and also described in detail in Example 1. Genome sequence segments having a frequency of occurrence equal to or greater than the mean frequency of occurrence for all genome sequences being analyzed may be chosen as a sub-set for further analysis. The frequency of occurrence threshold criterion may also be chosen to be above the mean frequency of occurrence or below the mean frequency of occurrence. The sub-set may be chosen with a frequency of occurrence threshold criterion that defines the sub-set as consisting of 80%, 70%, 60% or 50% of the total unique genome sequence segments or any whole or fractional number therebetween.

[0175] A “selectivity ratio” may be chosen as the threshold criterion. The selectivity ratio is defined in the “Definitions” section and also described in detail in Example 1. All genome sequence segments having a selectivity ratio equal to or greater than the mean selectivity ratio may be chosen as a sub-set for further analysis. The selectivity ratio threshold criterion may also be chosen above the mean selectivity ratio or below the mean selectivity ratio. The sub-set may also be chosen with a selectivity ratio threshold criterion that defines the sub-set as consisting of 80%, 70%, 60% or 50% of the total unique genome sequence segments or any whole or fractional number therebetween.

[0176] Choosing the target genome sequence segments that are useful as primer hybridization sites may be facilitated by the identification of most, if not all, of the unique genome sequence segments with lengths of 5, 6, 7, 8, 9, 10, 11, 12, 13, 14, 15, 16, 17, 18, 19, 20, 21, 22, 23, 24, 25, 26, 27, 28, 29, 30, 31, 32, 33, 34, 35, 36, 37, 38, 39, 40, 41, 42, 43, 44, 45, 46, 47, 48, 49, 50, 51, 52, 53, 54, 55, 56, 57, 58, 59, 60, 61, 62, 63, 64, 65, 66, 67, 68, 69, 70, 71, 72, 73, 74, 75, 76, 77, 78, 79, 80, 81, 82, 83, 84, 85, 86, 87, 88, 89, 90, 91, 92, 93, 94, 95, 96, 97, 98, 99, and 100 nucleobases from which the primer hybridization sites will be chosen. Identification of unique sequence segments within genome sequences itself is a procedure that is well known to those with ordinary skill in bioinformatics. Furthermore, determination of the frequency of occurrence of a given genome sequence segment can be determined routinely using BLAST programs (basic local alignment search tools) and PowerBLAST programs known in the art (Altschul et al., J. Mol. Biol., 1990, 215, 403-410; Zhang and Madden, Genome Res., 1997, 7, 649-656). One with ordinary skill will recognize that improvements in polymerase processivity through, for example, protein engineering, discovery of new polymerases or improvements in amplification reagents and methods will allow for a shift in the balance between selectivity and sensitivity toward selectivity because a polymerase with improved processivity can synthesize longer stretches of primer extension products without the need for high frequency of occurrence of shorter genome sequence segments acting as hybridization sites for shorter primers. Thus, primer lengths above 13 nucleobases are also practical for use in targeted genome amplification.

[0177] Example 1 provides a demonstration of identification of unique genome sequence segments within a target genome, determination of the frequencies of occurrence of the genome sequence segments within the target genome sequence and determination of the frequencies of occurrence of the genome sequence segments within the background genome sequences. The example further describes calculation and ranking of selectivity ratios using the frequencies of occurrence of genome sequence segments within the target genomes and within the background genomes. In brief, selectivity ratios provide a description of the selectivity of a given genome sequence segment towards the target genome(s) with respect to the background genomes. A selectivity ratio is calculated for a given genome sequence segment simply by dividing the frequency of occurrence of the genome sequence segment within the target genome(s) by the frequency of occurrence of the genome sequence segment in the background genomes. A high selectivity ratio for a given genome sequence segment is favorable because it indicates that a primer designed to hybridize to the genome sequence segment will hybridize to the target genome(s) more frequently than it will hybridize to the background genomes, thus, accomplishing one objective for selective priming of the target genome. Selectivity ratios can be calculated either for a single target genome or for a plurality of target genomes. It is advantageous to consider the frequency of occurrence of all genome sequence segments in all of the chosen background genome segments to obtain useful selectivity ratios but, depending on the objective of the targeted genome amplification, it is not typically necessary to consider all possible target genomes in calculation of selectivity ratios. For example, in a simplified system consisting of two target genomes (target genome A and target genome B) and three background genomes (background genomes C, D and E), the selectivity ratio for genome sequence segment X which occurs once (frequency of occurrence=1) in A, B, C, D and E, the target genome A selectivity ratio would be calculated as follows:

1(A)/(1(C)+1(D)+1(E))=0.333

[0178] In contrast, the total target genome (A+B) selectivity ratio would be calculated as follows:

1(A)+1(B)/(1(C)+1(D)+1(E)=0.667

[0179] The selectivity ratio may also be a hit ratio or combined hit ratio as described herein. The methods for selecting primers for targeted genome amplification and the algorithms disclosed herein may be performed using a computer-based method. The computer-based method may comprise an input for inputting the genome sequences of interest and parameters for performing the primer selection methods and algorithms described herein into the memory of a computer, and an output, that displays the results of the primer selection methods and algorithms. The computer-based method may comprise a database of genome sequences, and an algorithm for identifying sequence similarity, such as a BLAST algorithm. The computer-based method may comprise entry or selection of the genome sequences and parameters for performing the primer selection methods and algorithms, and execution of the primer selection methods and algorithms. The output of the primer selection methods and algorithms may be a file, such as a table, and the file may be stored in the memory of the computer.

### 3. TARGETED GENOME CAPTURE PROBES

[0180] A primer for targeted genome amplification as described herein may be used as a capture probe. A primer set or portion thereof as described herein may also be used as a capture probe. A capture probe may be used to detect a target genome or a target partial genome. The capture probe may be immobilized according to a Synchronous Coefficient of Drag Alteration (SCODA) method as described in International Application No. PCT/US10/26550, the contents of which are incorporated herein by reference. The capture probe may allow for selective concentration of the target genome from the background genome. The target genome may then be subjected to targeted genome amplification by using a primer or plurality of primers having the same sequence as the capture probe or probes. The probe may also be a real-time probe, a scorpion probe, a hybridization probe, a 5′-nuclease probe, a molecular beacon probe, and a FISH probe. The probe may also be attached to a microarray or HPLC.

### 4. TARGETED GENOME AMPLIFICATION PRIMER KITS

[0181] Also provided herein is a kit that includes targeted genome amplification primers designed according to the methods disclosed herein. The kit may comprise primers designed for general targeted genome amplification of bacteria from one or more collections of background genomes. For example, a targeted genome amplification kit for identification of bacteria in soil may have primers selected based on the genomes of typical background organisms found in soil. In another example, a targeted genome amplification kit for genotyping of viruses causing respiratory illness might be assembled with primers selected based on the target genomes of the respiratory pathogens and background genomes including the human genome and the genomes of commensal organisms found in human mucus, or other fluids. In another example, a targeted genome amplification kit for genotyping of sepsis-causing bacteria might be assembled with primers selected based on the target genomes of the sepsis-causing bacteria and background genomes including the human genome. Since human blood generally does not contain significant quantities of bacteria under non-sepsis conditions, bacterial genomes generally not be included in the primer selection process for this kit.

[0182] The kit may comprise a sufficient quantity of a polymerase enzyme having high processivity. The high processivity polymerase may be Phi29 polymerase or Taq polymerase. The high processivity polymerase may be a genetically engineered polymerase whose processivity is increased relative to the native polymerase from which it was constructed. The kit may further comprise deoxynucleotide triphosphates, buffers, buffer additives such as magnesium salts, trehalose and betaine at concentrations optimized for targeted genome amplification. The kit may also further comprise instructions for carrying out targeted genome amplification reactions.

### 5. PROGRAMMING, COMPUTER READABLE MEDIA AND COMPUTER SYSTEMS

[0183] Provided herein is computer programming written on computer readable media for performing the methods set forth herein. While the subject programming finds use in a variety of settings, it is most commonly used in a computer system comprising a processor, a memory, an input, and an output that are coupled to each other.

[0184] FIG. 14 is a simplified block diagram of computer system 80. Computer system 80 may include at least one processor 100 that communicates with a peripheral device. The peripheral device may include a memory 110, a user interface input device 90, user interface output device 120 (e.g. a monitor). The input and output devices may allow user interaction with computer system 80. The user may be a human user, a device, or another computer.

[0185] The user interface input device 90 may include a keyboard, a pointing device such as a mouse, trackball, touchpad, or graphics tablet, a scanner, a touchscreen incorporated into the display, an audio input device such as a voice recognition system, microphone, or other types of input device. The term “input device” may include any possible type of devices and ways to input information into computer system 80.

[0186] User interface output device 120 may include a display subsystem, a printer, a fax machine, or non-visual display such as an audio output device. The display subsystem may be a cathode ray tube (CRT), a flat-panel device such as a liquid crystal display (LCD), or a projection device. The display subsystem may also provide non-visual display such as via audio output devices. The term “output device” may include any possible types of devices and ways to output information from computer system 80 to a human or to another machine or computer system.

[0187] Memory 110 stores the basic programming and data constructs that provide the functionality of the various systems described herein. For example, an algorithm for performing a method set forth above may be stored in memory 110 as a software module. The software module may be executed by processor 100. In a distributed environment, the software module may be stored on a plurality of computer systems and executed by processors of the plurality of computer systems. Memory 110 also provides a repository for storing the various databases storing information described herein.

[0188] Memory 110 may include a number of memories including a main random access memory (RAM) for storage of instructions and data during program execution and a read only memory (ROM) in which fixed instructions are stored. A file storage subsystem may provide persistent (non-volatile) storage for program and data files, and may include a computer readable media, e.g., a hard disk drive, a floppy disk drive along with associated removable media, a Compact Digital Read Only Memory (CD-ROM) drive, an optical drive, removable media cartridges, and other like storage media. One or more of the drives may be located at remote locations on other connected computers at another site on a communication network.

[0189] Computer system 80 may be a personal computer, a portable computer, a workstation, a computer terminal, a network computer, a television, a mainframe, or any other data processing system. Due to the ever-changing nature of computers and networks, the description of computer system 80 depicted in FIG. 14 is intended only as a specific example for purposes of illustrating a common embodiment of the present invention. Many other configurations of a computer system are possible having more or less components than the computer system depicted in FIG. 14.

### 6. BIOAGENT IDENTIFYING AMPLICONS

[0190] Disclosed herein are methods for detection and identification of unknown bioagents using bioagent identifying amplicons. Primers as described above are further selected from the pool of primers to hybridize to conserved sequence regions of nucleic acids derived from a bioagent, and which bracket variable sequence regions to yield a bioagent identifying amplicon, which can be amplified and which is amenable to molecular mass determination. The molecular mass then provides a means to uniquely identify the bioagent without a requirement for prior knowledge of the possible identity of the bioagent. The molecular mass or corresponding base composition signature of the amplification product is then matched against a database of molecular masses or base composition signatures. A match is obtained when an experimentally-determined molecular mass or base composition of an analyzed amplification product is compared with known molecular masses or base compositions of known bioagent identifying amplicons and the experimentally determined molecular mass or base composition is the same as the molecular mass or base composition of one of the known bioagent identifying amplicons. Alternatively, the experimentally-determined molecular mass or base composition may be within experimental error of the molecular mass or base composition of a known bioagent identifying amplicon and still be classified as a match. In some cases, the match may also be classified using a probability of match model such as the models described in U.S. Ser. No. 11/073,362, which is commonly owned and incorporated herein by reference in entirety. Furthermore, the method can be applied to rapid parallel multiplex analyses, the results of which can be employed in a triangulation identification strategy. The present method provides rapid throughput and does not require nucleic acid sequencing of the amplified target sequence for bioagent detection and identification.

[0191] Despite enormous biological diversity, all forms of life on earth share sets of essential, common features in their genomes. Since genetic data provide the underlying basis for identification of bioagents by the methods disclosed herein, it is necessary to select segments of nucleic acids which ideally provide enough variability to distinguish each individual bioagent and whose molecular mass is amenable to molecular mass determination.

[0192] Unlike bacterial genomes, which exhibit conservation of numerous genes (i.e. housekeeping genes) across all organisms, viruses do not share a gene that is essential and conserved among all virus families. Therefore, viral identification is achieved within smaller groups of related viruses, such as members of a particular virus family or genus. For example, RNA-dependent RNA polymerase is present in all single-stranded RNA viruses and can be used for broad priming as well as resolution within the virus family.

[0193] At least one bacterial nucleic acid segment may be amplified in the process of identifying the bacterial bioagent. Thus, the nucleic acid segments that can be amplified by the primers disclosed herein and that provide enough variability to distinguish each individual bioagent and whose molecular masses are amenable to molecular mass determination are herein described as bioagent identifying amplicons.

[0194] Bioagent identifying amplicons may comprise from about 27 to about 200 nucleobases (i.e. from about 39 to about 200 linked nucleosides), although both longer and short regions may be used. One of ordinary skill in the art will appreciate that these embodiments include compounds of 27, 28, 29, 30, 31, 32, 33, 34, 35, 36, 37, 38, 39, 40, 41, 42, 43, 44, 45, 46, 47, 48, 49, 50, 51, 52, 53, 54, 55, 56, 57, 58, 59, 60, 61, 62, 63, 64, 65, 66, 67, 68, 69, 70, 71, 72, 73, 74, 75, 76, 77, 78, 79, 80, 81, 82, 83, 84, 85, 86, 87, 88, 89, 90, 91, 92, 93, 94, 95, 96, 97, 98, 99, 100, 101, 102, 103, 104, 105, 106, 107, 108, 109, 110, 111, 112, 113, 114, 115, 116, 117, 118, 119, 120, 121, 122, 123, 124, 125, 126, 127, 128, 129, 130, 131, 132, 133, 134, 135, 136, 137, 138, 139, 140, 141, 142, 143, 144, 145, 146, 147, 148, 149, 150, 151, 152, 153, 154, 155, 156, 157, 158, 159, 160, 161, 162, 163, 164, 165, 166, 167, 168, 169, 170, 171, 172, 173, 174, 175, 176, 177, 178, 179, 180, 181, 182, 183, 184, 185, 186, 187, 188, 189, 190, 191, 192, 193, 194, 195, 196, 197, 198, 199 or 200 nucleobases in length, or any range therewithin.

[0195] It is the combination of the portions of the bioagent nucleic acid segment to which the primers hybridize (hybridization sites) and the variable region between the primer hybridization sites that comprises the bioagent identifying amplicon. Thus, it can be said that a given bioagent identifying amplicon is “defined by” a given pair of primers.

[0196] Bioagent identifying amplicons amenable to molecular mass determination which are produced by the primers described herein may be either of a length, size or mass compatible with the particular mode of molecular mass determination or compatible with a means of providing a predictable fragmentation pattern in order to obtain predictable fragments of a length compatible with the particular mode of molecular mass determination. Such means of providing a predictable fragmentation pattern of an amplification product include, but are not limited to, cleavage with chemical reagents, restriction enzymes or cleavage primers, for example. Thus, bioagent identifying amplicons may be larger than 200 nucleobases and may be amenable to molecular mass determination following restriction digestion. Methods of using restriction enzymes and cleavage primers are well known to those with ordinary skill in the art.

[0197] Amplification products corresponding to bioagent identifying amplicons may be obtained using the polymerase chain reaction (PCR) that is a routine method to those with ordinary skill in the molecular biology arts. Other amplification methods may be used such as ligase chain reaction (LCR), low-stringency single primer PCR, and multiple strand displacement amplification (MDA). These methods are also known to those with ordinary skill.

### 7. PRIMER PAIRS THAT DEFINE BIOAGENT IDENTIFYING AMPLICONS

[0198] The primers may be designed to bind to conserved sequence regions of a bioagent identifying amplicon that flank an intervening variable region and yield amplification products which provide variability sufficient to distinguish each individual bioagent, and which are amenable to molecular mass analysis. The highly conserved sequence regions may exhibit between about 80-100%, or between about 90-100%, or between about 95-100% identity, or between about 99-100% identity. The molecular mass of a given amplification product provides a means of identifying the bioagent from which it was obtained, due to the variability of the variable region. Thus, design of the primers involves selection of a variable region with sufficient variability to resolve the identity of a given bioagent. Bioagent identifying amplicons may be specific to the identity of the bioagent.

[0199] Identification of bioagents may be accomplished at different levels using primers suited to resolution of each individual level of identification. Broad range survey primers are designed with the objective of identifying a bioagent as a member of a particular division (e.g., an order, family, genus or other such grouping of bioagents above the species level of bioagents). Broad range survey intelligent primers may be capable of identification of bioagents at the species or sub-species level. Examples of broad range survey primers include, but are not limited to: primer pair numbers: 346 (SEQ ID NOs: 594:602), and 348 (SEQ ID NOs: 595:603) which target DNA encoding 16S rRNA, and primer pair number 349 (SEQ ID NOs: 596:604) which targets DNA encoding 23S rRNA. Additional broad range survey primer pairs are disclosed in U.S. Ser. No. 11/409,535 which is incorporated herein by reference in entirety.

[0200] Drill-down primers may be designed with the objective of identifying a bioagent at the sub-species level (including strains, subtypes, variants and isolates) based on sub-species characteristics which may, for example, include single nucleotide polymorphisms (SNPs), variable number tandem repeats (VNTRs), deletions, drug resistance mutations or any other modification of a nucleic acid sequence of a bioagent relative to other members of a species having different sub-species characteristics. Drill-down intelligent primers are not always required for identification at the sub-species level because broad range survey intelligent primers may, in some cases provide sufficient identification resolution to accomplishing this identification objective. Examples of drill-down primers are disclosed in U.S. patent application Ser. No. 11/409,535 which is incorporated herein by reference in entirety.

[0201] A representative process flow diagram used for primer selection and validation process is outlined in FIG. 8. For each group of organisms, candidate target sequences are identified (200) from which nucleotide alignments are created (210) and analyzed (220). Primers are then designed by selecting appropriate priming regions (230) to facilitate the selection of candidate primer pairs (240). The primer pairs are then subjected to in silico analysis by electronic PCR (ePCR) (300) wherein bioagent identifying amplicons are obtained from sequence databases such as GenBank or other sequence collections (310) and checked for specificity in silico (320). Bioagent identifying amplicons obtained from GenBank sequences (310) can also be analyzed by a probability model which predicts the capability of a given amplicon to identify unknown bioagents such that the base compositions of amplicons with favorable probability scores are then stored in a base composition database (325). Alternatively, base compositions of the bioagent identifying amplicons obtained from the primers and GenBank sequences can be directly entered into the base composition database (330). Candidate primer pairs (240) are validated by testing their ability to hybridize to target nucleic acid by an in vitro amplification by a method such as PCR analysis (400) of nucleic acid from a collection of organisms (410). Amplification products thus obtained are analyzed by gel electrophoresis or by mass spectrometry to confirm the sensitivity, specificity and reproducibility of the primers used to obtain the amplification products (420).

[0202] Many important pathogens, including the organisms of greatest concern as biowarfare agents, have been completely sequenced. This effort has greatly facilitated the design of primers for the detection of unknown bioagents. The combination of broad-range priming with division-wide and drill-down priming has been used very successfully in several applications of the technology, including environmental surveillance for biowarfare threat agents and clinical sample analysis for medically important pathogens.

[0203] Synthesis of primers is well known and routine in the art. The primers may be conveniently and routinely made through the well-known technique of solid phase synthesis. Equipment for such synthesis is sold by several vendors including, for example, Applied Biosystems (Foster City, Calif.). Any other means for such synthesis known in the art may additionally or alternatively be employed. However, it should be noted that “synthesis” of primers does not equate with “design” of primers. The primers disclosed herein have been designed by the methods disclosed herein and then synthesized by the known methods. Primers may be employed as compositions for use in methods for identification of bacterial bioagents as follows: a primer pair composition is contacted with nucleic acid (such as, for example, bacterial DNA or DNA reverse transcribed from the rRNA) of an unknown bacterial bioagent. The nucleic acid is then amplified by a nucleic acid amplification technique, such as PCR for example, to obtain an amplification product that represents a bioagent identifying amplicon. The molecular mass of each strand of the double-stranded amplification product is determined by a molecular mass measurement technique such as mass spectrometry for example, wherein the two strands of the double-stranded amplification product are separated during the ionization process. The mass spectrometry may be electrospray Fourier transform ion cyclotron resonance mass spectrometry (ESI-FTICR-MS) or electrospray time of flight mass spectrometry (ESI-TOF-MS). A list of possible base compositions can be generated for the molecular mass value obtained for each strand and the choice of the correct base composition from the list is facilitated by matching the base composition of one strand with a complementary base composition of the other strand. The molecular mass or base composition thus determined is then compared with a database of molecular masses or base compositions of analogous bioagent identifying amplicons for known bacterial bioagents. A match between the molecular mass or base composition of the amplification product and the molecular mass or base composition of an analogous bioagent identifying amplicon for a known viral bioagent indicates the identity of the unknown bacterial bioagent. The method may be repeated using one or more different primer pairs to resolve possible ambiguities in the identification process or to improve the confidence level for the identification assignment.

[0204] A bioagent identifying amplicon may be produced using only a single primer (either the forward or reverse primer of any given primer pair), provided an appropriate amplification method is chosen, such as, for example, low stringency single primer PCR (LSSP-PCR). Adaptation of this amplification method in order to produce bioagent identifying amplicons can be accomplished by one with ordinary skill in the art without undue experimentation.

[0205] The molecular mass or base composition of a bacterial bioagent identifying amplicon defined by a broad range survey primer pair may not provide enough resolution to unambiguously identify a bacterial bioagent at or below the species level. These cases benefit from further analysis of one or more bacterial bioagent identifying amplicons generated from at least one additional broad range survey primer pair or from at least one additional division-wide primer pair. The employment of more than one bioagent identifying amplicon for identification of a bioagent is herein referred to as triangulation identification.

[0206] The oligonucleotide primers may be division-wide primers which hybridize to nucleic acid encoding genes of species within a genus of bacteria. The oligonucleotide primers may be drill-down primers which enable the identification of sub-species characteristics. Drill down primers provide the functionality of producing bioagent identifying amplicons for drill-down analyses such as strain typing when contacted with nucleic acid under amplification conditions. Identification of such sub-species characteristics is often critical for determining proper clinical treatment of viral infections. In some embodiments, sub-species characteristics are identified using only broad range survey primers and division-wide and drill-down primers are not used. The primers used for amplification may hybridize to and amplify genomic DNA, and DNA of bacterial plasmids.

[0207] Various computer software programs may be used to aid in design of primers for amplification reactions such as Primer Premier 5 (Premier Biosoft, Palo Alto, Calif.) or OLIGO Primer Analysis Software (Molecular Biology Insights, Cascade, Colo.). These programs allow the user to input desired hybridization conditions such as melting temperature of a primer-template duplex for example. An in silico PCR search algorithm, such as (ePCR) may be used to analyze primer specificity across a plurality of template sequences which can be readily obtained from public sequence databases such as GenBank for example. An existing RNA structure search algorithm (Macke et al., Nucl. Acids Res., 2001, 29, 4724-4735, the contents of which are incorporated herein by reference in its entirety) has been modified to include PCR parameters such as hybridization conditions, mismatches, and thermodynamic calculations (SantaLucia, Proc. Natl. Acad. Sci. U.S.A., 1998, 95, 1460-1465, which is incorporated herein by reference in its entirety). This also provides information on primer specificity of the selected primer pairs. In some embodiments, the hybridization conditions applied to the algorithm can limit the results of primer specificity obtained from the algorithm. In some embodiments, the melting temperature threshold for the primer template duplex is specified to be 35° C. or a higher temperature. In some embodiments the number of acceptable mismatches is specified to be seven mismatches or less. In some embodiments, the buffer components and concentrations and primer concentrations may be specified and incorporated into the algorithm, for example, an appropriate primer concentration is about 250 nM and appropriate buffer components are 50 mM sodium or potassium and 1.5 mM Mg²⁺.

[0208] One with ordinary skill in the art of design of amplification primers will recognize that a given primer need not hybridize with 100% complementarity in order to effectively prime the synthesis of a complementary nucleic acid strand in an amplification reaction. Moreover, a primer may hybridize over one or more segments such that intervening or adjacent segments are not involved in the hybridization event. (e.g., for example, a loop structure or a hairpin structure). The primers may comprise at least 70%, at least 75%, at least 80%, at least 85%, at least 90%, at least 95% or at least 99% sequence identity with any of the primers listed in Table 2 of U.S. Ser. No. 11/409,535, the contents of which are incorporated herein by reference in entirety. Thus, in some embodiments, an extent of variation of 70% to 100%, or any range therewithin, of the sequence identity is possible relative to the specific primer sequences disclosed herein. Determination of sequence identity is described in the following example: a primer 20 nucleobases in length which is identical to another 20 nucleobase primer having two non-identical residues has 18 of 20 identical residues (18/20=0.9 or 90% sequence identity). In another example, a primer 15 nucleobases in length having all residues identical to a 15 nucleobase segment of primer 20 nucleobases in length would have 15/20=0.75 or 75% sequence identity with the 20 nucleobase primer.

[0209] Percent homology, sequence identity or complementarity, can be determined by, for example, the Gap program (Wisconsin Sequence Analysis Package, Version 8 for UNIX, Genetics Computer Group, University Research Park, Madison Wis.), using default settings, which uses the algorithm of Smith and Waterman (Adv. Appl. Math., 1981, 2, 482-489). Complementarity of primers with respect to the conserved priming regions of viral nucleic acid may be between about 70% and about 75% 80%. Homology, sequence identity or complementarity, may be between about 75% and about 80%. Homology, sequence identity or complementarity, may also be at least 85%, at least 90%, at least 92%, at least 94%, at least 95%, at least 96%, at least 97%, at least 98%, at least 99% or is 100%.

[0210] The primers described herein may comprise at least 70%, at least 75%, at least 80%, at least 85%, at least 90%, at least 92%, at least 94%, at least 95%, at least 96%, at least 98%, or at least 99%, or 100% (or any range therewithin) sequence identity with the primer sequences specifically disclosed herein.

[0211] One with ordinary skill is able to calculate percent sequence identity or percent sequence homology and able to determine, without undue experimentation, the effects of variation of primer sequence identity on the function of the primer in its role in priming synthesis of a complementary strand of nucleic acid for production of an amplification product of a corresponding bioagent identifying amplicon.

[0212] The primers may be at least 13 nucleobases in length. The primers may also be less than 36 nucleobases in length. The oligonucleotide primers may be 13, 14, 15, 16, 17, 18, 19, 20, 21, 22, 23, 24, 25, 26, 27, 28, 29, 30, 31, 32, 33, 34 or 35 nucleobases in length, or any range therewithin. The methods disclosed herein contemplate use of both longer and shorter primers. Furthermore, the primers may also be linked to one or more other desired moieties, including, but not limited to, affinity groups, ligands, regions of nucleic acid that are not complementary to the nucleic acid to be amplified, labels, etc. Primers may also form hairpin structures. For example, hairpin primers may be used to amplify short target nucleic acid molecules. The presence of the hairpin may stabilize the amplification complex (see e.g., TAQMAN MicroRNA Assays, Applied Biosystems, Foster City, Calif.).

[0213] Any oligonucleotide primer pair may have one or both primers with less then 70% sequence homology with a corresponding member of any of the primer pairs of Table 2 of U.S. Ser. No. 11/409,535, if the primer pair has the capability of producing an amplification product corresponding to a bioagent identifying amplicon. Any oligonucleotide primer pair may have one or both primers with a length greater than 35 nucleobases if the primer pair has the capability of producing an amplification product corresponding to a bioagent identifying amplicon. The function of a given primer may be substituted by a combination of two or more primers segments that hybridize adjacent to each other or that are linked by a nucleic acid loop structure or linker which allows a polymerase to extend the two or more primers in an amplification reaction.

[0214] The primer pairs used for obtaining bioagent identifying amplicons may be the primer pairs of Table 2 of U.S. Ser. No. 11/409,535. Other combinations of primer pairs may be possible by combining certain members of the forward primers with certain members of the reverse primers. An example can be seen in Table 2 of U.S. Ser. No. 11/409,535, for two primer pair combinations of forward primer 16S_EC_{—}789_{—}810 F with the reverse primers 16S_EC_{—}880_{—}894 R or 16S_EC_{—}882_{—}899 R. Arriving at a favorable alternate combination of primers in a primer pair depends upon the properties of the primer pair, most notably the size of the bioagent identifying amplicon that is defined by the primer pair, which preferably is between about 39 to about 200 nucleobases in length. Alternatively, a bioagent identifying amplicon longer than 200 nucleobases in length could be cleaved into smaller segments by cleavage reagents such as chemical reagents, or restriction enzymes, for example.

[0215] The primers may be configured to amplify nucleic acid of a bioagent to produce amplification products that can be measured by mass spectrometry and from whose molecular masses candidate base compositions can be readily calculated.

[0216] Any given primer may comprise a modification comprising the addition of a non-templated T residue to the 5′ end of the primer (i.e., the added T residue does not necessarily hybridize to the nucleic acid being amplified). The addition of a non-templated T residue has an effect of minimizing the addition of non-templated adenosine residues as a result of the non-specific enzyme activity of Taq polymerase (Magnuson et al., Biotechniques, 1996, 21, 700-709), an occurrence which may lead to ambiguous results arising from molecular mass analysis. Primers may contain one or more universal bases. Because any variation (due to codon wobble in the 3rd position) in the conserved regions among species is likely to occur in the third position of a DNA (or RNA) triplet, oligonucleotide primers can be designed such that the nucleotide corresponding to this position is a base which can bind to more than one nucleotide, referred to herein as a “universal nucleobase.” For example, under this “wobble” pairing, inosine (I) binds to U, C or A; guanine (G) binds to U or C, and uridine (U) binds to U or C. Other examples of universal nucleobases include nitroindoles such as 5-nitroindole or 3-nitropyrrole (Loakes et al., Nucleosides and Nucleotides, 1995, 14, 1001-1003), the degenerate nucleotides dP or dK (Hill et al.), an acyclic nucleoside analog containing 5-nitroindazole (Van Aerschot et al., Nucleosides and Nucleotides, 1995, 14, 1053-1056) or the purine analog 1-(2-deoxy-.beta.-D-ribofuranosyl)-imidazole-4-carboxamide (Sala et al., Nucl. Acids Res., 1996, 24, 3302-3306).

[0217] To compensate for the somewhat weaker binding by the wobble base, the oligonucleotide primers may be designed such that the first and second positions of each triplet are occupied by nucleotide analogs that bind with greater affinity than the unmodified nucleotide. Examples of these analogs include, but are not limited to, 2,6-diaminopurine which binds to thymine, 5-propynyluracil (also known as propynylated thymine) which binds to adenine and 5-propynylcytosine and phenoxazines, including G-clamp, which binds to G. Propynylated pyrimidines are described in U.S. Pat. Nos. 5,645,985, 5,830,653 and 5,484,908, the contents of all of which are incorporated herein by reference in their entirety. Propynylated primers are described in U.S. Pre-Grant Publication No. 2003-0170682, which is also commonly owned and the contents of which are incorporated herein by reference in their entirety. Phenoxazines are described in U.S. Pat. Nos. 5,502,177, 5,763,588, and 6,005,096, the contents of all of which are incorporated herein by reference in their entirety. G-clamps are described in U.S. Pat. Nos. 6,007,992 and 6,028,183, the contents of which are incorporated herein by reference in their entirety.

[0218] Primer hybridization may be enhanced using primers containing 5-propynyl deoxycytidine and deoxythymidine nucleotides. These modified primers offer increased affinity and base pairing selectivity.

[0219] Non-template primer tags may be used to increase the melting temperature (Tm) of a primer-template duplex in order to improve amplification efficiency. A non-template tag is at least three consecutive A or T nucleotide residues on a primer which are not complementary to the template. In any given non-template tag, A can be replaced by C or G and T can also be replaced by C or G. Although Watson-Crick hybridization is not expected to occur for a non-template tag relative to the template, the extra hydrogen bond in a G-C pair relative to an A-T pair confers increased stability of the primer-template duplex and improves amplification efficiency for subsequent cycles of amplification when the primers hybridize to strands synthesized in previous cycles.

[0220] Propynylated tags may be used in a manner similar to that of the non-template tag, wherein two or more 5-propynylcytidine or 5-propynyluridine residues replace template matching residues on a primer. A primer may contain a modified internucleoside linkage such as a phosphorothioate linkage, for example.

[0221] The primers may contain mass-modifying tags. Reducing the total number of possible base compositions of a nucleic acid of specific molecular weight provides a means of avoiding a persistent source of ambiguity in determination of base composition of amplification products. Addition of mass-modifying tags to certain nucleobases of a given primer will result in simplification of de novo determination of base composition of a given bioagent identifying amplicon from its molecular mass.

[0222] The mass modified nucleobase may comprise one or more of the following: for example, 7-deaza-2′-deoxyadenosine-5-triphosphate, 5-iodo-2′-deoxyuridine-5′-triphosphate, 5-bromo-2′-deoxyuridine-5′-triphosphate, 5-bromo-2′-deoxycytidine-5′-triphosphate, 5-iodo-2′-deoxycytidine-5′-triphosphate, 5-hydroxy-2′-deoxyuridine-5′-triphosphate, 4-thiothymidine-5′-triphosphate, 5-aza-2′-deoxyuridine-5′-triphosphate, 5-fluoro-2′-deoxyuridine-5′-triphosphate, O6-methyl-2′-deoxyguanosine-5′-triphosphate, N2-methyl-2′-deoxyguanosine-5′-triphosphate, 8-oxo-2′-deoxyguanosine-5′-triphosphate or thiothymidine-5′-triphosphate. The mass-modified nucleobase may comprise 15N or 13C or both 15N and 13C.

[0223] Multiplex amplification may be performed where multiple bioagent identifying amplicons are amplified with a plurality of primer pairs. The advantages of multiplexing are that fewer reaction containers (for example, wells of a 96- or 384-well plate) are needed for each molecular mass measurement, providing time, resource and cost savings because additional bioagent identification data can be obtained within a single analysis. Multiplex amplification methods are well known to those with ordinary skill and can be developed without undue experimentation. However, one useful and non-obvious step in selecting a plurality candidate bioagent identifying amplicons for multiplex amplification may be to ensure that each strand of each amplification product will be sufficiently different in molecular mass that mass spectral signals will not overlap and lead to ambiguous analysis results. In some embodiments, a 10 Da difference in mass of two strands of one or more amplification products is sufficient to avoid overlap of mass spectral peaks.

[0224] As an alternative to multiplex amplification, single amplification reactions may be pooled before analysis by mass spectrometry. In these embodiments, as for multiplex amplification embodiments, it is useful to select a plurality of candidate bioagent identifying amplicons to ensure that each strand of each amplification product will be sufficiently different in molecular mass that mass spectral signals will not overlap and lead to ambiguous analysis results.

### 8. DETERMINATION OF MOLECULAR MASS OF BIOAGENT IDENTIFYING AMPLICONS

[0225] The molecular mass of a given bioagent identifying amplicon may be determined by mass spectrometry. Mass spectrometry has several advantages, not the least of which is high bandwidth characterized by the ability to separate (and isolate) many molecular peaks across a broad range of mass to charge ratio (m/z). Thus mass spectrometry is intrinsically a parallel detection scheme without the need for radioactive or fluorescent labels, since every amplification product is identified by its molecular mass. The current state of the art in mass spectrometry is such that less than femtomole quantities of material can be readily analyzed to afford information about the molecular contents of the sample. An accurate assessment of the molecular mass of the material can be quickly obtained, irrespective of whether the molecular weight of the sample is several hundred, or in excess of one hundred thousand atomic mass units (amu) or Daltons. Intact molecular ions may be generated from amplification products using one of a variety of ionization techniques to convert the sample to gas phase. These ionization methods include, but are not limited to, electrospray ionization (ES), matrix-assisted laser desorption ionization (MALDI) and fast atom bombardment (FAB). Upon ionization, several peaks are observed from one sample due to the formation of ions with different charges. Averaging the multiple readings of molecular mass obtained from a single mass spectrum affords an estimate of molecular mass of the bioagent identifying amplicon. Electrospray ionization mass spectrometry (ESI-MS) is particularly useful for very high molecular weight polymers such as proteins and nucleic acids having molecular weights greater than 10 kDa, since it yields a distribution of multiply-charged molecules of the sample without causing a significant amount of fragmentation. The mass detectors used in the methods described herein include, but are not limited to, Fourier transform ion cyclotron resonance mass spectrometry (FT-ICR-MS), time of flight (TOF), ion trap, quadrupole, magnetic sector, Q-TOF, and triple quadrupole.

### 9. BASE COMPOSITIONS OF BIOAGENT IDENTIFYING AMPLICONS

[0226] Although the molecular mass of amplification products obtained using intelligent primers provides a means for identification of bioagents, conversion of molecular mass data to a base composition signature is useful for certain analyses. As used herein, “base composition” is the exact number of each nucleobase (A, T, C and G) determined from the molecular mass of a bioagent identifying amplicon. In some embodiments, a base composition provides an index of a specific organism. Base compositions can be calculated from known sequences of known bioagent identifying amplicons and can be experimentally determined by measuring the molecular mass of a given bioagent identifying amplicon, followed by determination of all possible base compositions which are consistent with the measured molecular mass within acceptable experimental error. The following example illustrates determination of base composition from an experimentally obtained molecular mass of a 46-mer amplification product originating at position 1337 of the 16S rRNA of Bacillus anthracis. The forward and reverse strands of the amplification product have measured molecular masses of 14208 and 14079 Da, respectively. The possible base compositions derived from the molecular masses of the forward and reverse strands for the Bacillus anthracis products are listed in Table 1.

TABLE 1
Possible Base Compositions for B. anthracis 46mer Amplification Product

| Calc. Mass | Mass Error | Base Composition | Calc. Mass | Mass Error | Base Composition |
|---|---|---|---|---|---|
| Forward Strand | Forward Strand | of Forward Strand | Reverse Strand | Reverse Strand | of Reverse Strand |
| 14208.2935 | 0.079520 | A1 G17 C10 T18 | 14079.2624 | 0.080600 | A0 G14 C13 T19 |
| 14208.3160 | 0.056980 | A1 G20 C15 T10 | 14079.2849 | 0.058060 | A0 G17 C18 T11 |
| 14208.3386 | 0.034440 | A1 G23 C20 T2 | 14079.3075 | 0.035520 | A0 G20 C23 T3 |
| 14208.3074 | 0.065560 | A6 G11 C3 T26 | 14079.2538 | 0.089180 | A5 G5 C1 T35 |
| 14208.3300 | 0.043020 | A6 G14 C8 T18 | 14079.2764 | 0.066640 | A5 G8 C6 T27 |
| 14208.3525 | 0.020480 | A6 G17 C13 T10 | 14079.2989 | 0.044100 | A5 G11 C11 T19 |
| 14208.3751 | 0.002060 | A6 G20 C18 T2 | 14079.3214 | 0.021560 | A5 G14 C16 T11 |
| 14208.3439 | 0.029060 | A11 G8 C1 T26 | 14079.3440 | 0.000980 | A5 G17 C21 T3 |
| 14208.3665 | 0.006520 | A11 G11 C6 T18 | 14079.3129 | 0.030140 | A10 G5 C4 T27 |
| 14208.3890 | 0.016020 | A11 G14 C11 T10 | 14079.3354 | 0.007600 | A10 G8 C9 T19 |
| 14208.4116 | 0.038560 | A11 G17 C16 T2 | 14079.3579 | 0.014940 | A10 G11 C14 T11 |
| 14208.4030 | 0.029980 | A16 G8 C4 T18 | 14079.3805 | 0.037480 | A10 G14 C19 T3 |
| 14208.4255 | 0.052520 | A16 G11 C9 T10 | 14079.3494 | 0.006360 | A15 G2 C2 T27 |
| 14208.4481 | 0.075060 | A16 G14 C14 T2 | 14079.3719 | 0.028900 | A15 G5 C7 T19 |
| 14208.4395 | 0.066480 | A21 G5 C2 T18 | 14079.3944 | 0.051440 | A15 G8 C12 T11 |
| 14208.4620 | 0.089020 | A21 G8 C7 T10 | 14079.4170 | 0.073980 | A15 G11 C17 T3 |
| — | — | — | 14079.4084 | 0.065400 | A20 G2 C5 T19 |
| — | — | — | 14079.4309 | 0.087940 | A20 G5 C10 T13 |

[0227] Among the 16 possible base compositions for the forward strand and the 18 possible base compositions for the reverse strand that were calculated, only one pair (shown in bold) are complementary base compositions, which indicates the true base composition of the amplification product. It should be recognized that this logic is applicable for determination of base compositions of any bioagent identifying amplicon, regardless of the class of bioagent from which the corresponding amplification product was obtained.

[0228] Assignment of previously unobserved base compositions (also known as “true unknown base compositions”) to a given phylogeny may be accomplished via the use of pattern classifier model algorithms. Base compositions, like sequences, vary slightly from strain to strain within species, for example. In some embodiments, the pattern classifier model is the mutational probability model. On other embodiments, the pattern classifier is the polytope model. The mutational probability model and polytope model are both commonly owned and described in U.S. patent application Ser. No. 11/073,362, the contents of which are incorporated herein by reference in their entirety.

[0229] This diversity may be managed by building “base composition probability clouds” around the composition constraints for each species. This permits identification of organisms in a fashion similar to sequence analysis. A “pseudo four-dimensional plot” can be used to visualize the concept of base composition probability clouds. Optimal primer design requires optimal choice of bioagent identifying amplicons and maximizes the separation between the base composition signatures of individual bioagents. Areas where clouds overlap indicate regions that may result in a misclassification, a problem which is overcome by a triangulation identification process using bioagent identifying amplicons not affected by overlap of base composition probability clouds.

[0230] Base composition probability clouds may provide the means for screening potential primer pairs in order to avoid potential misclassifications of base compositions. Base composition probability clouds may also provide the means for predicting the identity of a bioagent whose assigned base composition was not previously observed and/or indexed in a bioagent identifying amplicon base composition database due to evolutionary transitions in its nucleic acid sequence. Thus, in contrast to probe-based techniques, mass spectrometry determination of base composition does not require prior knowledge of the composition or sequence in order to make the measurement.

[0231] The methods disclosed herein provide bioagent classifying information similar to DNA sequencing and phylogenetic analysis at a level sufficient to identify a given bioagent. Furthermore, the process of determination of a previously unknown base composition for a given bioagent (for example, in a case where sequence information is unavailable) has downstream utility by providing additional bioagent indexing information with which to populate base composition databases. The process of future bioagent identification is thus greatly improved as more base composition indexes become available in base composition databases.

### 10. TRIANGULATION IDENTIFICATION

[0232] A molecular mass of a single bioagent identifying amplicon alone may not provide enough resolution to unambiguously identify a given bioagent. The employment of more than one bioagent identifying amplicon for identification of a bioagent is herein referred to as “triangulation identification.” Triangulation identification is pursued by determining the molecular masses of a plurality of bioagent identifying amplicons selected within a plurality of housekeeping genes. This process is used to reduce false negative and false positive signals, and enable reconstruction of the origin of hybrid or otherwise engineered bioagents. For example, identification of the three part toxin genes typical of B. anthracis (Bowen et al., J. Appl. Microbiol., 1999, 87, 270-278) in the absence of the expected signatures from the B. anthracis genome would suggest a genetic engineering event.

[0233] The triangulation identification process may be pursued by characterization of bioagent identifying amplicons in a massively parallel fashion using the polymerase chain reaction (PCR), such as multiplex PCR where multiple primers are employed in the same amplification reaction mixture, or PCR in multi-well plate format wherein a different and unique pair of primers is used in multiple wells containing otherwise identical reaction mixtures. Such multiplex and multi-well PCR methods are well known to those with ordinary skill in the arts of rapid throughput amplification of nucleic acids. One PCR reaction per well or container may be carried out, followed by an amplicon pooling step wherein the amplification products of different wells are combined in a single well or container which is then subjected to molecular mass analysis. The combination of pooled amplicons can be chosen such that the expected ranges of molecular masses of individual amplicons are not overlapping and thus will not complicate identification of signals.

### 11. CODON BASE COMPOSITION ANALYSIS

[0234] One or more nucleotide substitutions within a codon of a gene of an infectious organism may confer drug resistance upon an organism which can be determined by codon base composition analysis. The organism may be a bacterium, virus, fungus or protozoan. The amplification product containing the codon being analyzed may be of a length of about 39 to about 200 nucleobases. The primers employed in obtaining the amplification product can hybridize to upstream and downstream sequences directly adjacent to the codon, or can hybridize to upstream and downstream sequences one or more sequence positions away from the codon. The primers may have between about 70% to 100% sequence complementarity with the sequence of the gene containing the codon being analyzed.

[0235] The codon analysis may be undertaken for the purpose of investigating genetic disease in an individual. In other embodiments, the codon analysis is undertaken for the purpose of investigating a drug resistance mutation or any other deleterious mutation in an infectious organism such as a bacterium, virus, fungus or protozoan. In some embodiments, the bioagent is a bacterium identified in a biological product.

[0236] The molecular mass of an amplification product containing the codon being analyzed may be measured by mass spectrometry. The mass spectrometry can be either electrospray (ESI) mass spectrometry or matrix-assisted laser desorption ionization (MALDI) mass spectrometry. Time-of-flight (TOF) is an example of one mode of mass spectrometry compatible with the methods disclosed herein.

[0237] The methods disclosed herein can also be employed to determine the relative abundance of drug resistant strains of the organism being analyzed. Relative abundances can be calculated from amplitudes of mass spectral signals with relation to internal calibrants. In some embodiments, known quantities of internal amplification calibrants can be included in the amplification reactions and abundances of analyte amplification product estimated in relation to the known quantities of the calibrants.

[0238] Upon identification of one or more drug-resistant strains of an infectious organism infecting an individual, one or more alternative treatments may be devised to treat the individual.

### 12. DETERMINATION OF THE QUANTITY OF A BIOAGENT USING A CALIBRATION AMPLICON

[0239] The identity and quantity of an unknown bioagent may be determined using the process illustrated in FIG. 9. Primers (500) and a known quantity of a calibration polynucleotide (505) are added to a sample containing nucleic acid of an unknown bioagent. The total nucleic acid in the sample is then subjected to an amplification reaction (510) to obtain amplification products. The molecular masses of amplification products are determined (515) from which are obtained molecular mass and abundance data. The molecular mass of the bioagent identifying amplicon (520) provides the means for its identification (525) and the molecular mass of the calibration amplicon obtained from the calibration polynucleotide (530) provides the means for its identification (535). The abundance data of the bioagent identifying amplicon is recorded (540) and the abundance data for the calibration data is recorded (545), both of which are used in a calculation (550) which determines the quantity of unknown bioagent in the sample. A sample comprising an unknown bioagent is contacted with a pair of primers that provide the means for amplification of nucleic acid from the bioagent, and a known quantity of a polynucleotide that comprises a calibration sequence. The nucleic acids of the bioagent and of the calibration sequence are amplified and the rate of amplification is reasonably assumed to be similar for the nucleic acid of the bioagent and of the calibration sequence. The amplification reaction then produces two amplification products: a bioagent identifying amplicon and a calibration amplicon. The bioagent identifying amplicon and the calibration amplicon should be distinguishable by molecular mass while being amplified at essentially the same rate. Effecting differential molecular masses can be accomplished by choosing as a calibration sequence, a representative bioagent identifying amplicon (from a specific species of bioagent) and performing, for example, a 2-8 nucleobase deletion or insertion within the variable region between the two priming sites. The amplified sample containing the bioagent identifying amplicon and the calibration amplicon is then subjected to molecular mass analysis by mass spectrometry, for example. The resulting molecular mass analysis of the nucleic acid of the bioagent and of the calibration sequence provides molecular mass data and abundance data for the nucleic acid of the bioagent and of the calibration sequence. The molecular mass data obtained for the nucleic acid of the bioagent enables identification of the unknown bioagent and the abundance data enables calculation of the quantity of the bioagent, based on the knowledge of the quantity of calibration polynucleotide contacted with the sample.

[0240] Construction of a standard curve where the amount of calibration polynucleotide spiked into the sample is varied may provide additional resolution and improved confidence for the determination of the quantity of bioagent in the sample. The use of standard curves for analytical determination of molecular quantities is well known to one with ordinary skill and can be performed without undue experimentation.

[0241] Multiplex amplification may be performed where multiple bioagent identifying amplicons are amplified with multiple primer pairs which also amplify the corresponding standard calibration sequences. The standard calibration sequences may optionally be included within a single vector which functions as the calibration polynucleotide. Multiplex amplification methods are well known to those with ordinary skill and can be performed without undue experimentation.

[0242] The calibrant polynucleotide may be used as an internal positive control to confirm that amplification conditions and subsequent analysis steps are successful in producing a measurable amplicon. Even in the absence of copies of the genome of a bioagent, the calibration polynucleotide should give rise to a calibration amplicon. Failure to produce a measurable calibration amplicon indicates a failure of amplification or subsequent analysis step such as amplicon purification or molecular mass determination. Reaching a conclusion that such failures have occurred is in itself, a useful event.

[0243] The calibration sequence may be comprised of DNA or RNA. The calibration sequence may be inserted into a vector that itself functions as the calibration polynucleotide. More than one calibration sequence may be inserted into the vector that functions as the calibration polynucleotide. Such a calibration polynucleotide is herein termed a “combination calibration polynucleotide.” The process of inserting polynucleotides into vectors is routine to those skilled in the art and can be accomplished without undue experimentation. Thus, it should be recognized that the calibration method should not be limited to the embodiments described herein. The calibration method can be applied for determination of the quantity of any bioagent identifying amplicon when an appropriate standard calibrant polynucleotide sequence is designed and used. The process of choosing an appropriate vector for insertion of a calibrant is also a routine operation that can be accomplished by one with ordinary skill without undue experimentation.

### 13. IDENTIFICATION OF BACTERIA USING BIOAGENT IDENTIFYING AMPLICONS

[0244] The primer pairs may produce bioagent identifying amplicons defined by priming regions at stable and highly conserved regions of nucleic acid of bacteria. The advantage to characterization of an amplicon defined by priming regions that fall within a highly conserved region is that there is a low probability that the region will evolve past the point of primer recognition, in which case, the primer hybridization of the amplification step would fail. Such a primer pair is thus useful as a broad range survey-type primer pair. In another embodiment, the intelligent primers produce bioagent identifying amplicons including a region which evolves more quickly than the stable region described above. The advantage of characterization bioagent identifying amplicon corresponding to an evolving genomic region is that it is useful for distinguishing emerging strain variants or the presence of virulence genes, drug resistance genes, or codon mutations that induce drug resistance.

[0245] The methods disclosed herein have significant advantages as a platform for identification of diseases caused by emerging bacterial strains such as, for example, drug-resistant strains of Staphylococcus aureus. The methods disclosed herein eliminate the need for prior knowledge of bioagent sequence to generate hybridization probes. This is possible because the methods are not confounded by naturally occurring evolutionary variations occurring in the sequence acting as the template for production of the bioagent identifying amplicon. Measurement of molecular mass and determination of base composition is accomplished in an unbiased manner without sequence prejudice.

[0246] Provided herein is a means of tracking the spread of a bacterium, such as a particular drug-resistant strain when a plurality of samples obtained from different locations are analyzed by the methods described above in an epidemiological setting. A plurality of samples from a plurality of different locations may be analyzed with primer pairs which produce bioagent identifying amplicons, a subset of which contains a specific drug-resistant bacterial strain. The corresponding locations of the members of the drug-resistant strain subset indicate the spread of the specific drug-resistant strain to the corresponding locations.

[0247] Also provided is a means of identifying a sepsis-causing bacterium. The sepsis-causing bacterium is identified in samples including, but not limited to blood and fractions thereof (including but not limited to serum and buffy coat), sputum, urine, specific cell types including but not limited to hepatic cells, and various tissue biopsies.

[0248] Sepsis-causing bacteria include, but are not limited to the following bacteria: Prevotella denticola, Porphyromonas gingivalis, Borrelia burgdorferi, Mycobacterium tuberculosis, Mycobacterium fortuitum, Corynebacterium jeikeium, Propionibacterium acnes, Mycoplasma pneumoniae, Streptococcus agalactiae, Streptococcus pneumoniae, Streptococcus mitis, Streptococcus pyogenes, Listeria monocytogenes, Enterococcus faecalis, Enterococcus faecium, Staphylococcus aureus, Staphylococcus coagulase-negative, Staphylococcus epidermis, Staphylococcus hemolyticus, Campylobacter jejuni, Bordatella pertussis, Burkholderia cepacia, Legionella pneumophila, Acinetobacter baumannii, Acinetobacter calcoaceticus, Pseudomonas aeru ginosa, Aeromonas hydrophila, Enterobacter aerogenes, Enterobacter cloacae, Klebsiella pneumoniae, Moxarella catarrhalis, Morganella morganii, Proteus mirabilis, Proteus vulgaris, Pantoea agglomerans, Bartonella henselae, Stenotrophomonas maltophila, Actinobacillus actinomycetemcomitans, Haemophilus influenzae, Escherichia coli, Klebsiella oxytoca, Serratia marcescens, and Yersinia enterocolitica.

[0249] Identification of a sepsis-causing bacterium may provide the information required to choose an antibiotic with which to treat an individual infected with the sepsis-causing bacterium and treating the individual with the antibiotic. Treatment of humans with antibiotics is well known to medical practitioners with ordinary skill.

### 14. KITS FOR PRODUCING BIOAGENT IDENTIFYING AMPLICONS

[0250] Also provided are kits for carrying out the methods described herein. In some embodiments, the kit may comprise a sufficient quantity of one or more primer pairs to perform an amplification reaction on a target polynucleotide from a bioagent to form a bioagent identifying amplicon. The kit may comprise from one to fifty primer pairs, from one to twenty primer pairs, from one to ten primer pairs, or from two to five primer pairs. The kit may comprise one or more primer pairs recited in Table 2 of U.S. Ser. No. 11/409,535, the contents of which are incorporated herein by reference in their entirety.

[0251] The kit may comprise one or more broad range survey primer(s), division wide primer(s), or drill-down primer(s), or any combination thereof. If a given problem involves identification of a specific bioagent, the solution to the problem may require the selection of a particular combination of primers to provide the solution to the problem. A kit may be designed so as to comprise particular primer pairs for identification of a particular bioagent. A drill-down kit may be used, for example, to distinguish different genotypes or strains, drug-resistant, or otherwise. The primer pair components of any of these kits may be additionally combined to comprise additional combinations of broad range survey primers and division-wide primers so as to be able to identify a bacterium.

[0252] The kit may contain standardized calibration polynucleotides for use as internal amplification calibrants. Internal calibrants are described in commonly owned PCT Publication No. WO 2005/098047, the contents of which are incorporated herein by reference in their entirety.

[0253] The kit may comprise a sufficient quantity of reverse transcriptase (if RNA is to be analyzed for example), a DNA polymerase, suitable nucleoside triphosphates (including alternative dNTPs such as inosine or modified dNTPs such as the 5-propynyl pyrimidines or any dNTP containing molecular mass-modifying tags such as those described above), a DNA ligase, and/or reaction buffer, or any combination thereof, for the amplification processes described above. A kit may further include instructions pertinent for the particular embodiment of the kit, such instructions describing the primer pairs and amplification conditions for operation of the method. A kit may also comprise amplification reaction containers such as microcentrifuge tubes and the like. A kit may also comprise reagents or other materials for isolating bioagent nucleic acid or bioagent identifying amplicons from amplification, including, for example, detergents, solvents, or ion exchange resins which may be linked to magnetic beads. A kit may also comprise a table of measured or calculated molecular masses and/or base compositions of bioagents using the primer pairs of the kit.

[0254] Also provided is a kit that contains one or more survey bacterial primer pairs represented by primer pair compositions wherein each member of each pair of primers has 70% to 100% sequence identity with the corresponding member from the group of primer pairs represented by any of the primer pairs of Table 2 of U.S. Ser. No. 11/409,535. The survey primer pairs may include broad range primer pairs which hybridize to ribosomal RNA, and may also include division-wide primer pairs which hybridize to housekeeping genes such as rp1B, tufB, rpoB, rpoC, valS, and infB, for example.

[0255] The kit may contain one or more survey bacterial primer pairs and one or more triangulation genotyping analysis primer pairs such as the primer pairs of Tables 8, 12, 14, 19, 21, 23, or 24 of U.S. Ser. No. 11/409,535. The kit may represent a less expansive genotyping analysis but include triangulation genotyping analysis primer pairs for more than one genus or species of bacteria. For example, a kit for surveying nosocomial infections at a health care facility may include, for example, one or more broad range survey primer pairs, one or more division wide primer pairs, one or more Acinetobacter baumannii triangulation genotyping analysis primer pairs and one or more Staphylococcus aureus triangulation genotyping analysis primer pairs. One with ordinary skill will be capable of analyzing in silico amplification data to determine which primer pairs will be able to provide optimal identification resolution for the bacterial bioagents of interest.

[0256] A kit may be assembled for identification of sepsis-causing bacteria. An example of such a kit embodiment is a kit comprising one or more of the primer pairs of Table 25 of U.S. Ser. No. 11/409,535, which provide for a broad survey of sepsis-causing bacteria.

[0257] The kit may have 96-well or 384-well plates with a plurality of wells containing any or all of the following components: dNTPs, buffer salts, Mg²⁺, betaine, and primer pairs. A polymerase may also be included in the plurality of wells of the 96-well or 384-well plates. The kit may contain instructions for PCR and mass spectrometry analysis of amplification products obtained using the primer pairs of the kits. The kit may include a barcode which uniquely identifies the kit and the components contained therein according to production lots and may also include any other information relative to the components such as concentrations, storage temperatures, etc. The barcode may also include analysis information to be read by optical barcode readers and sent to a computer controlling amplification, purification and mass spectrometric measurements. The barcode may provide access to a subset of base compositions in a base composition database which is in digital communication with base composition analysis software such that a base composition measured with primer pairs from a given kit can be compared with known base compositions of bioagent identifying amplicons defined by the primer pairs of that kit.

[0258] The kit may contain a database of base compositions of bioagent identifying amplicons defined by the primer pairs of the kit. The database is stored on a convenient computer readable medium such as a compact disk or USB drive, for example.

[0259] The kit may include a computer program stored on a computer formatted medium (such as a compact disk or portable USB disk drive, for example) comprising instructions which direct a processor to analyze data obtained from the use of the primer pairs disclosed herein. The instructions of the software transform data related to amplification products into a molecular mass or base composition which is a useful concrete and tangible result used in identification and/or classification of bioagents. The kit may contain all of the reagents sufficient to carry out one or more of the methods described herein.

### 15. COMBINATION KITS INCLUDING TARGETED GENOME AMPLIFICATION PRIMERS AND PRIMER PAIRS FOR OBTAINING BIOAGENT IDENTIFYING AMPLICONS

[0260] Also provided herein is a kit that includes targeted genome amplification primers and primer pairs for production of bioagent identifying amplicons. The kit may be for use in applications where a bioagent such as a human pathogen for example, is present only in small quantities in a human clinical sample. An example of such a kit could include a set of targeted genome amplification primers for selective amplification of a bacterium implicated in septicemia. The targeted genome amplification primers are designed with human genomic DNA chosen as a background genome, for the purpose of detection of an infection of an individual with Bacillus anthracis. The kit would also include one or more broad range survey primer pairs and/or division-wide primer pairs for production of amplification products corresponding to bioagent identifying amplicons for identification of the bacterium. Optionally one or more drill-down primer pairs are included in the kit for determining sub-species characteristics of the septicemia by analysis of additional bioagent identifying amplicons.

[0261] The combination kit may also include a plurality of polymerase enzymes whose members are specialized for a PCR type amplification reaction, such as Taq polymerase, for example, to obtain amplification products corresponding to bioagent identifying amplicons, and such as Phi29 polymerase which is a high processivity polymerase suitable for catalysis of multiple displacement amplification reactions for targeted genome amplification reactions carried out for elevating the quantity of a target genome of interest.

[0262] The combination kit may also include amplification reagents including but not limited to: deoxynucleotide triphosphates, compatible solutes such as betaine and trehalose, buffer components, and salts such as magnesium chloride.

[0263] While the present invention has been described with specificity in accordance with certain of its embodiments, the following examples serve only to illustrate the invention and are not intended to limit the same. In order that the invention disclosed herein may be more efficiently understood, examples are provided below. It should be understood that these examples are for illustrative purposes only and are not to be construed as limiting the invention in any manner.

[0264] The present invention has multiple aspects, illustrated by the following non-limiting examples.

### Example 1

### Identification and Ranking of Genome Sequence Segments

[0265] This example illustrates the process of identification of unique genome sequence segments of 6 to 12 nucleobases in length, as well as determination of frequency of occurrence and selectivity ratio values for a simplified hypothetical genome model system consisting of a single target genome having the sequence: aaaaaaaaaattttttttttccccccccccgggggggggg ((SEQ ID NO: 16) base composition of A10 T10 C10 and G10) with two background genomes having the following sequences aaaaaaaattttttttccccccccgggggggg (SEQ ID NO: 17) Bkg 1: base composition of A8 T8 C8 G8) and aaaaaaaaaatttttttttt (SEQ ID NO: 18) Bkg 2: base composition of A10 T10 C0 G0). Table 2 provides a list of all unique genome sequence segments for the target genome and indicates the frequency of occurrence of each genome sequence segment in the target genome and in the background genomes. For example, the genome sequence segment having the sequence of eight consecutive c residues cccccccc (SEQ ID NO:45) occurs 3 times (bold) within the 10 nucleobase stretch of c residues in the simplified hypothetical target genome:

(SEQ ID NO: 16)
aaaaaaaaaattttttttttccccccccccgggggggggg;
(SEQ ID NO: 16)
aaaaaaaaaattttttttttccccccccccgggggggggg;
(SEQ ID NO: 16)
aaaaaaaaaattttttttttccccccccccgggggggggg;

(c residue stretch underlined) but only once in the background genomes (the genome sequence segment appears once in Bkg 1 and does not appear in Bkg 2). The selectivity ratio for this genome sequence segment is 3.00 as determined by dividing the frequency of occurrence in the target genome by the frequency of occurrence in the background genomes. The data in Table 2 are sorted according to the selectivity ratio rank. A selectivity ratio of infinity (.infin.) indicates that the genome sequence segment does not occur in the background genomes (Bkg 1 and Bkg 2). The mean frequency of occurrence of the genome sequence segments in the target genome was calculated to be 1.22 and the mean selectivity ratio was calculated to be 0.76. If desired, these values could be used as threshold values for selection of one or more sub-sets of genome sequence segments for further characterization by processes such as the process shown in FIG. 2 for example. Alternatively, threshold values greater than or less than the mean frequency of occurrence or the mean selectivity ratio could be chosen.

TABLE 2
Frequency of Occurrence of Genome Sequence Segments in a Hypothetical Target
Genome and Two Hypothetical Background Genomes

| Genome | | | | | | Selec- | Selec- |
|---|---|---|---|---|---|---|---|
| Sequence | SEQ ID | Frequency | Frequency | Frequency | Total | tivity | tivity |
| Segment | NO: | in Target | in Bkg 1 | in Bkg 2 | Background | Ratio | Ratio Rank |
| ccccccccc | 19 | 2 | 0 | 0 | 0 | Infinity | 1 |
| ggggggggg | 20 | 2 | 0 | 0 | 0 | Infinity | 1 |
| cccccccccc | 21 | 1 | 0 | 0 | 0 | Infinity | 1 |
| cccccccccg | 22 | 1 | 0 | 0 | 0 | Infinity | 1 |
| cggggggggg | 23 | 1 | 0 | 0 | 0 | Infinity | 1 |
| gggggggggg | 24 | 1 | 0 | 0 | 0 | Infinity | 1 |
| tccccccccc | 25 | 1 | 0 | 0 | 0 | Infinity | 1 |
| tttttttttc | 26 | 1 | 0 | 0 | 0 | Infinity | 1 |
| ccccccccccg | 27 | 1 | 0 | 0 | 0 | Infinity | 1 |
| cccccccccgg | 28 | 1 | 0 | 0 | 0 | Infinity | 1 |
| ccggggggggg | 29 | 1 | 0 | 0 | 0 | Infinity | 1 |
| cgggggggggg | 30 | 1 | 0 | 0 | 0 | Infinity | 1 |
| tcccccccccc | 31 | 1 | 0 | 0 | 0 | Infinity | 1 |
| ttccccccccc | 32 | 1 | 0 | 0 | 0 | Infinity | 1 |
| tttttttttcc | 33 | 1 | 0 | 0 | 0 | Infinity | 1 |
| ttttttttttc | 34 | 1 | 0 | 0 | 0 | Infinity | 1 |
| attttttttttc | 35 | 1 | 0 | 0 | 0 | Infinity | 1 |
| ccccccccccgg | 36 | 1 | 0 | 0 | 0 | Infinity | 1 |
| cccccccccggg | 37 | 1 | 0 | 0 | 0 | Infinity | 1 |
| cccggggggggg | 38 | 1 | 0 | 0 | 0 | Infinity | 1 |
| ccgggggggggg | 39 | 1 | 0 | 0 | 0 | Infinity | 1 |
| tccccccccccg | 40 | 1 | 0 | 0 | 0 | Infinity | 1 |
| ttcccccccccc | 41 | 1 | 0 | 0 | 0 | Infinity | 1 |
| tttccccccccc | 42 | 1 | 0 | 0 | 0 | Infinity | 1 |
| tttttttttccc | 43 | 1 | 0 | 0 | 0 | Infinity | 1 |
| ttttttttttcc | 44 | 1 | 0 | 0 | 0 | Infinity | 1 |
| cccccccc | 45 | 3 | 1 | 0 | 1 | 3.00 | 2 |
| gggggggg | 46 | 3 | 1 | 0 | 1 | 3.00 | 2 |
| ggggggg | 47 | 4 | 2 | 0 | 2 | 2.00 | 3 |
| cccccc | 48 | 5 | 3 | 0 | 3 | 1.67 | 4 |
| gggggg | 49 | 5 | 3 | 0 | 3 | 1.67 | 4 |
| cccccg | 50 | 1 | 1 | 0 | 1 | 1.00 | 5 |
| ccccgg | 51 | 1 | 1 | 0 | 1 | 1.00 | 5 |
| cccggg | 52 | 1 | 1 | 0 | 1 | 1.00 | 5 |
| ccgggg | 53 | 1 | 1 | 0 | 1 | 1.00 | 5 |
| cggggg | 54 | 1 | 1 | 0 | 1 | 1.00 | 5 |
| tccccc | 55 | 1 | 1 | 0 | 1 | 1.00 | 5 |
| ttcccc | 56 | 1 | 1 | 0 | 1 | 1.00 | 5 |
| tttccc | 57 | 1 | 1 | 0 | 1 | 1.00 | 5 |
| ttttcc | 58 | 1 | 1 | 0 | 1 | 1.00 | 5 |
| tttttc | 59 | 1 | 1 | 0 | 1 | 1.00 | 5 |
| ccccccg | 60 | 1 | 1 | 0 | 1 | 1.00 | 5 |
| cccccgg | 61 | 1 | 1 | 0 | 1 | 1.00 | 5 |
| ccccggg | 62 | 1 | 1 | 0 | 1 | 1.00 | 5 |
| cccgggg | 63 | 1 | 1 | 0 | 1 | 1.00 | 5 |
| ccggggg | 64 | 1 | 1 | 0 | 1 | 1.00 | 5 |
| cgggggg | 65 | 1 | 1 | 0 | 1 | 1.00 | 5 |
| tcccccc | 66 | 1 | 1 | 0 | 1 | 1.00 | 5 |
| ttccccc | 67 | 1 | 1 | 0 | 1 | 1.00 | 5 |
| tttcccc | 68 | 1 | 1 | 0 | 1 | 1.00 | 5 |
| ttttccc | 69 | 1 | 1 | 0 | 1 | 1.00 | 5 |
| tttttcc | 70 | 1 | 1 | 0 | 1 | 1.00 | 5 |
| ttttttc | 71 | 1 | 1 | 0 | 1 | 1.00 | 5 |
| cccccccg | 72 | 1 | 1 | 0 | 1 | 1.00 | 5 |
| ccccccgg | 73 | 1 | 1 | 0 | 1 | 1.00 | 5 |
| cccccggg | 74 | 1 | 1 | 0 | 1 | 1.00 | 5 |
| ccccgggg | 75 | 1 | 1 | 0 | 1 | 1.00 | 5 |
| cccggggg | 76 | 1 | 1 | 0 | 1 | 1.00 | 5 |
| ccgggggg | 77 | 1 | 1 | 0 | 1 | 1.00 | 5 |
| cggggggg | 78 | 1 | 1 | 0 | 1 | 1.00 | 5 |
| tccccccc | 79 | 1 | 1 | 0 | 1 | 1.00 | 5 |
| ttcccccc | 80 | 1 | 1 | 0 | 1 | 1.00 | 5 |
| tttccccc | 81 | 1 | 1 | 0 | 1 | 1.00 | 5 |
| ttttcccc | 82 | 1 | 1 | 0 | 1 | 1.00 | 5 |
| tttttccc | 83 | 1 | 1 | 0 | 1 | 1.00 | 5 |
| ttttttcc | 84 | 1 | 1 | 0 | 1 | 1.00 | 5 |
| tttttttc | 85 | 1 | 1 | 0 | 1 | 1.00 | 5 |
| aaaaaaaaa | 86 | 2 | 0 | 2 | 2 | 1.00 | 5 |
| ccccccccg | 87 | 1 | 1 | 0 | 1 | 1.00 | 5 |
| cccccccgg | 88 | 1 | 1 | 0 | 1 | 1.00 | 5 |
| ccccccggg | 89 | 1 | 1 | 0 | 1 | 1.00 | 5 |
| cccccgggg | 90 | 1 | 1 | 0 | 1 | 1.00 | 5 |
| ccccggggg | 91 | 1 | 1 | 0 | 1 | 1.00 | 5 |
| cccgggggg | 92 | 1 | 1 | 0 | 1 | 1.00 | 5 |
| ccggggggg | 93 | 1 | 1 | 0 | 1 | 1.00 | 5 |
| cgggggggg | 94 | 1 | 1 | 0 | 1 | 1.00 | 5 |
| tcccccccc | 95 | 1 | 1 | 0 | 1 | 1.00 | 5 |
| ttccccccc | 96 | 1 | 1 | 0 | 1 | 1.00 | 5 |
| tttcccccc | 97 | 1 | 1 | 0 | 1 | 1.00 | 5 |
| ttttccccc | 98 | 1 | 1 | 0 | 1 | 1.00 | 5 |
| tttttcccc | 99 | 1 | 1 | 0 | 1 | 1.00 | 5 |
| ttttttccc | 100 | 1 | 1 | 0 | 1 | 1.00 | 5 |
| tttttttcc | 101 | 1 | 1 | 0 | 1 | 1.00 | 5 |
| ttttttttc | 102 | 1 | 1 | 0 | 1 | 1.00 | 5 |
| ttttttttt | 103 | 2 | 0 | 2 | 2 | 1.00 | 5 |
| aaaaaaaaaa | 104 | 1 | 0 | 1 | 1 | 1.00 | 5 |
| aaaaaaaaat | 105 | 1 | 0 | 1 | 1 | 1.00 | 5 |
| attttttttt | 106 | 1 | 0 | 1 | 1 | 1.00 | 5 |
| ccccccccgg | 107 | 1 | 1 | 0 | 1 | 1.00 | 5 |
| cccccccggg | 108 | 1 | 1 | 0 | 1 | 1.00 | 5 |
| ccccccgggg | 109 | 1 | 1 | 0 | 1 | 1.00 | 5 |
| cccccggggg | 110 | 1 | 1 | 0 | 1 | 1.00 | 5 |
| ccccgggggg | 111 | 1 | 1 | 0 | 1 | 1.00 | 5 |
| cccggggggg | 112 | 1 | 1 | 0 | 1 | 1.00 | 5 |
| ccgggggggg | 113 | 1 | 1 | 0 | 1 | 1.00 | 5 |
| ttcccccccc | 114 | 1 | 1 | 0 | 1 | 1.00 | 5 |
| tttccccccc | 115 | 1 | 1 | 0 | 1 | 1.00 | 5 |
| ttttcccccc | 116 | 1 | 1 | 0 | 1 | 1.00 | 5 |
| tttttccccc | 117 | 1 | 1 | 0 | 1 | 1.00 | 5 |
| ttttttcccc | 118 | 1 | 1 | 0 | 1 | 1.00 | 5 |
| tttttttccc | 119 | 1 | 1 | 0 | 1 | 1.00 | 5 |
| ttttttttcc | 120 | 1 | 1 | 0 | 1 | 1.00 | 5 |
| tttttttttt | 121 | 1 | 0 | 1 | 1 | 1.00 | 5 |
| aaaaaaaaaat | 122 | 1 | 0 | 1 | 1 | 1.00 | 5 |
| aaaaaaaaatt | 123 | 1 | 0 | 1 | 1 | 1.00 | 5 |
| aattttttttt | 124 | 1 | 0 | 1 | 1 | 1.00 | 5 |
| atttttttttt | 125 | 1 | 0 | 1 | 1 | 1.00 | 5 |
| ccccccccggg | 126 | 1 | 1 | 0 | 1 | 1.00 | 5 |
| cccccccgggg | 127 | 1 | 1 | 0 | 1 | 1.00 | 5 |
| ccccccggggg | 128 | 1 | 1 | 0 | 1 | 1.00 | 5 |
| cccccgggggg | 129 | 1 | 1 | 0 | 1 | 1.00 | 5 |
| ccccggggggg | 130 | 1 | 1 | 0 | 1 | 1.00 | 5 |
| cccgggggggg | 131 | 1 | 1 | 0 | 1 | 1.00 | 5 |
| tttcccccccc | 132 | 1 | 1 | 0 | 1 | 1.00 | 5 |
| ttttccccccc | 133 | 1 | 1 | 0 | 1 | 1.00 | 5 |
| tttttcccccc | 134 | 1 | 1 | 0 | 1 | 1.00 | 5 |
| ttttttccccc | 135 | 1 | 1 | 0 | 1 | 1.00 | 5 |
| tttttttcccc | 136 | 1 | 1 | 0 | 1 | 1.00 | 5 |
| ttttttttccc | 137 | 1 | 1 | 0 | 1 | 1.00 | 5 |
| aaaaaaaaaatt | 138 | 1 | 0 | 1 | 1 | 1.00 | 5 |
| aaaaaaaaattt | 139 | 1 | 0 | 1 | 1 | 1.00 | 5 |
| aaattttttttt | 140 | 1 | 0 | 1 | 1 | 1.00 | 5 |
| aatttttttttt | 141 | 1 | 0 | 1 | 1 | 1.00 | 5 |
| ccccccccgggg | 142 | 1 | 1 | 0 | 1 | 1.00 | 5 |
| cccccccggggg | 143 | 1 | 1 | 0 | 1 | 1.00 | 5 |
| ccccccgggggg | 144 | 1 | 1 | 0 | 1 | 1.00 | 5 |
| cccccggggggg | 145 | 1 | 1 | 0 | 1 | 1.00 | 5 |
| ccccgggggggg | 146 | 1 | 1 | 0 | 1 | 1.00 | 5 |
| ttttcccccccc | 147 | 1 | 1 | 0 | 1 | 1.00 | 5 |
| tttttccccccc | 148 | 1 | 1 | 0 | 1 | 1.00 | 5 |
| ttttttcccccc | 149 | 1 | 1 | 0 | 1 | 1.00 | 5 |
| tttttttccccc | 150 | 1 | 1 | 0 | 1 | 1.00 | 5 |
| ttttttttcccc | 151 | 1 | 1 | 0 | 1 | 1.00 | 5 |
| aaaaaaaa | 15 | 3 | 1 | 3 | 4 | 0.75 | 6 |
| tttttttt | 153 | 3 | 1 | 3 | 4 | 0.75 | 6 |
| aaaaaaa | 154 | 4 | 2 | 4 | 6 | 0.67 | 7 |
| ccccccc | 155 | 4 | 2 | 4 | 6 | 0.67 | 7 |
| ttttttt | 156 | 4 | 2 | 4 | 6 | 0.67 | 7 |
| aaaaaa | 157 | 5 | 3 | 5 | 8 | 0.63 | 8 |
| tttttt | 158 | 5 | 3 | 5 | 8 | 0.63 | 8 |
| aaaaat | 159 | 1 | 1 | 1 | 2 | 0.50 | 9 |
| aaaatt | 160 | 1 | 1 | 1 | 2 | 0.50 | 9 |
| aaattt | 161 | 1 | 1 | 1 | 2 | 0.50 | 9 |
| aatttt | 162 | 1 | 1 | 1 | 2 | 0.50 | 9 |
| attttt | 163 | 1 | 1 | 1 | 2 | 0.50 | 9 |
| aaaaaat | 164 | 1 | 1 | 1 | 2 | 0.50 | 9 |
| aaaaatt | 165 | 1 | 1 | 1 | 2 | 0.50 | 9 |
| aaaattt | 166 | 1 | 1 | 1 | 2 | 0.50 | 9 |
| aaatttt | 167 | 1 | 1 | 1 | 2 | 0.50 | 9 |
| aattttt | 168 | 1 | 1 | 1 | 2 | 0.50 | 9 |
| atttttt | 169 | 1 | 1 | 1 | 2 | 0.50 | 9 |
| aaaaaaat | 170 | 1 | 1 | 1 | 2 | 0.50 | 9 |
| aaaaaatt | 171 | 1 | 1 | 1 | 2 | 0.50 | 9 |
| aaaaattt | 172 | 1 | 1 | 1 | 2 | 0.50 | 9 |
| aaaatttt | 173 | 1 | 1 | 1 | 2 | 0.50 | 9 |
| aaattttt | 174 | 1 | 1 | 1 | 2 | 0.50 | 9 |
| aatttttt | 175 | 1 | 1 | 1 | 2 | 0.50 | 9 |
| attttttt | 176 | 1 | 1 | 1 | 2 | 0.50 | 9 |
| aaaaaaaat | 177 | 1 | 1 | 1 | 2 | 0.50 | 9 |
| aaaaaaatt | 178 | 1 | 1 | 1 | 2 | 0.50 | 9 |
| aaaaaattt | 179 | 1 | 1 | 1 | 2 | 0.50 | 9 |
| aaaaatttt | 180 | 1 | 1 | 1 | 2 | 0.50 | 9 |
| aaaattttt | 181 | 1 | 1 | 1 | 2 | 0.50 | 9 |
| aaatttttt | 182 | 1 | 1 | 1 | 2 | 0.50 | 9 |
| aattttttt | 183 | 1 | 1 | 1 | 2 | 0.50 | 9 |
| atttttttt | 184 | 1 | 1 | 1 | 2 | 0.50 | 9 |
| aaaaaaaatt | 185 | 1 | 1 | 1 | 2 | 0.50 | 9 |
| aaaaaaattt | 186 | 1 | 1 | 1 | 2 | 0.50 | 9 |
| aaaaaatttt | 187 | 1 | 1 | 1 | 2 | 0.50 | 9 |
| aaaaattttt | 188 | 1 | 1 | 1 | 2 | 0.50 | 9 |
| aaaatttttt | 189 | 1 | 1 | 1 | 2 | 0.50 | 9 |
| aaattttttt | 190 | 1 | 1 | 1 | 2 | 0.50 | 9 |
| aatttttttt | 191 | 1 | 1 | 1 | 2 | 0.50 | 9 |
| aaaaaaaattt | 192 | 1 | 1 | 1 | 2 | 0.50 | 9 |
| aaaaaaatttt | 193 | 1 | 1 | 1 | 2 | 0.50 | 9 |
| aaaaaattttt | 194 | 1 | 1 | 1 | 2 | 0.50 | 9 |
| aaaaatttttt | 195 | 1 | 1 | 1 | 2 | 0.50 | 9 |
| aaaattttttt | 196 | 1 | 1 | 1 | 2 | 0.50 | 9 |
| aaatttttttt | 197 | 1 | 1 | 1 | 2 | 0.50 | 9 |
| aaaaaaaatttt | 198 | 1 | 1 | 1 | 2 | 0.50 | 9 |
| aaaaaaattttt | 199 | 1 | 1 | 1 | 2 | 0.50 | 9 |
| aaaaaatttttt | 200 | 1 | 1 | 1 | 2 | 0.50 | 9 |
| aaaaattttttt | 201 | 1 | 1 | 1 | 2 | 0.50 | 9 |
| aaaatttttttt | 202 | 1 | 1 | 1 | 2 | 0.50 | 9 |

### Example 2

### In Silico Method for Design of Primers for Targeted Whole Genome Amplification

[0266] Some embodiments of the methods disclosed herein are in silico methods for selecting primers for targeted whole genome amplification. The primers are selected by first defining the target genome(s) and background genome(s). For the target genome(s), all unique genome sequence segments of lengths of about 5 to about 13 nucleobases in length are determined by a set of computer executable instructions stored on a computer-readable medium.

[0267] In some embodiments, the target and background genome segments are obtained from public databases such as GenBank, for example. The frequency of occurrence values of members of the genome sequence segments in the target genome(s) and background genome(s) are determined by computer executable instructions such as a BLAST algorithm for example. The selectivity ratio values of members of the genome sequence segments are determined by computer executable mathematical instructions. In some embodiments, the in silico method ranks the genome sequence segments according to frequency of occurrence and/or selectivity ratio. In some embodiments, a frequency of occurrence threshold value is chosen to define a sub-set of genome sequence segments to carry forward.

[0268] In some embodiments, a selectivity ratio threshold value is chosen to define a sub-set of genome sequence segments to carry forward. In some embodiments, the selectivity ratio threshold value is any whole or fractional percentage between about 25% above or about 25% below the mean selectivity ratio. For example, if the mean selectivity ratio is 55, the chosen selectivity ratio threshold value may be any whole or fractional number between about 41.25 and about 68.75. In other embodiments, both a frequency of occurrence threshold value and a selectivity ratio threshold value are chosen and both of these threshold values are used to define the sub-set of genome sequence segments to carry forward. The genome sequence segments are ranked according to the chosen threshold value.

[0269] At this point, a process such as the process outlined in FIG. 2 may be followed wherein the top ranked genome sequence segment is selected and added to the sub-set of genome sequence segments (1000). Then the next highest ranking genome sequence segment is selected (2000) and subjected to a first computer executable query (3000) which determines whether or not the next ranked genome sequence segment originates from within the largest remaining separation distance (remaining portion of the genome which has not had a genome sequence segment selected). If the next highest ranking genome sequence segment does not originate within the largest separation distance, it is skipped (but remains in with the same rank in the group of unselected genome sequence segments) and the process reverts to step 2000. If the next highest ranking genome sequence segment does originate from within the largest separation distance it is selected and added to the set of genome sequence segments to which primers will be designed (4000). An example of operation of steps 1000 to 5000 (including cycling between steps 2000 and 5000) of FIG. 2 follows: the top ranked genome sequence segment (#1) is selected by default in step 1000. As a result of selection of genome sequence segment #1, only two separation distances remain on the target genome. One of the two separation distances stretches from the 5′ end of the #1 genome sequence segment to the 5′ end of the genome and the other of the two separation distances stretches from the 3′ end of the #1 genome sequence segment to the 5′ end of the genome. It is assumed in this example that the 5′ end of the genome to the 5′ end of the #1 genome sequence segment has the longest separation distance. In step 2000, the next highest ranked genome sequence segment (#2 in this case) is selected. At step 3000 (query 1) it is determined whether or not the #2 ranked genome sequence segment is located within this longest separation distance between the 5′ end of the genome and the 5′ end of the #1 genome sequence segment. If the #2 ranked genome sequence segment is not located within this longest separation distance, it is not selected and remains in the unselected group while the process reverts to step 2000 where the next highest ranked genome sequence segment (#3) is selected from the list of ranked genome sequence segments. In performing step 3000 on genome sequence segment #3, it is determined that this genome sequence segment is located within the largest separation distance. Thus genome sequence segment #3 is added to the sub-set in step 4000. At this point, only genome sequence segments #1 and #3 have been added to the sub-set. In step 5000, it is confirmed that the predetermined quantity of genome sequence segments (for example 200 genome sequence segments) has not been obtained (because only 2 genome sequence segments have been selected thus far). The answer to query 2 (5000) is “no” and the process cycles back to step 2000 where the next ranked genome sequence segment is selected. In this example, the next ranked genome sequence segment is #2 because it was skipped in the previous cycle. In step 3000 query 1 determines that genome sequence segment now does fall within the largest separation distance (because the largest separation distance in the previous cycle is no longer the largest in the current cycle due to the appearance of genome sequence segment #3). Thus genome sequence segment #2 is added to the sub-set in step 4000. Step 5000 is then performed and the answer to query 2 is “no” because only 3 genome sequence segments have been selected thus far. Again the process cycles back to step 2000 and continues cycling between steps 2000 and 5000, selecting the next highest ranked genome sequence segments in each cycle and performing the queries of step 3000 and step 5000 until the predetermined quantity of genome sequence segments is obtained.

[0270] In some embodiments, the predetermined number of genome sequence segments is sufficient to provide consistently dispersed coverage of the genome by primers hybridizing to the selected genome sequence segments. In some embodiments, this predetermined number of genome sequence segments is between about 100 to about 300 genome sequence segments, including any number therebetween.

[0271] The predetermined number will depend upon the length of the target genome(s). For example, longer genomes may require additional primer coverage and thus selecting a larger predetermined number of genome sequence segments to serve as primer hybridization sites may be advantageous. In some embodiments, after a group of genome sequence segments have been selected, statistical measures such as those presented in Table 5 may be used to evaluate the likelihood that a group of primers designed to hybridize to the genome sequence segments will produce efficient and biased amplification of the target genome(s) of interest. If the statistics are deemed inefficient, it may be advantageous to consider revising the predetermined number of genome sequence segments to a larger number to provide greater coverage of the target genome(s). This statistical evaluation process is useful because it avoids the unnecessary expense of in vitro testing of entire groups of primers.

[0272] Continuing now in the process of FIG. 2, when the answer to the second query (5000) is “yes,” the predetermined quantity of genome sequence segments has been obtained. At that point, a third computer executable query (6000) is performed to determine whether or not the “stopping criterion/criteria” has or have been met. The “stopping criterion/criteria” represent the final threshold value(s) relating to genome sequence segment coverage over which the in silico method must pass before the method instructions and queries of the in silico end (7000). If the stopping criteria have not been met, the process cycles back to step 2000 with an adjustment of the selectivity threshold value if necessary (6500).

[0273] In some embodiments, a single stopping criterion used. In other embodiments, more than one stopping criteria are used. In one embodiment one stopping criterion is a value reflecting the mean separation distance between genome sequence segments within the target genome sequence(s). For example, a mean distance between genome sequence segments is a whole or fractional number less or equal to about 500, 600, 700, 900, or 1000 nucleobases or any whole or fractional number therebetween. In other embodiments, the stopping criterion is the mean distance between genome sequence segments within the target genome sequence(s) or a value above or below the mean distance between genome sequence segments within the target genome sequence(s).

[0274] In other embodiments, a stopping criterion is the maximum distance between any two of the selected genome sequence segments within the target genome sequence(s). For example, an appropriate maximum distance between any two genome sequence segments might be less than or equal to about 5,000, 6,000, 7,000, 8,000, 9,000 or 10,000 nucleobases or any number therebetween.

[0275] In some embodiments, after the stopping criterion or criteria have been met and the computer executable instructions are complete, the in silico method produces an output report comprising a list of genome sequence segments. The report may be a print-out or a display on a graphical interface or any other means for displaying the results of the selection process. The in silico method may also provide a means for designing primers that hybridize to the genome sequence segments.

### Example 3

### Selection of Primer Sets for Targeted Whole Genome Amplification

[0276] In a first example for targeted whole genome amplification, Bacillus anthracis Ames was chosen as a single target genome. The set of background genomes included the genomes of: Homo sapiens, Gallus gallus, Guillardia theta, Oryza sativa, Arabidopsis thaliana, Yarrowia lipolytica, Saccharomyces cerevisiae, Debaryomyces hansenii, Kluyveromyces lactis, Schizosaccharomyces pom, Aspergillus fumigatus, Cryptococcus neoformans, Encephalitozoon cuniculi, Eremothecium gossypii, Candida glabrata, Apis mellifera, Drosophila melanogaster, Tribolium castaneum, Anopheles gambiae, and Caenorhabditis elegans. These background genomes were chosen because they would be expected to be present in a typical soil sample handled by a human.

[0277] Unique genome sequence segments 7 to 12 nucleobases in length were identified. Frequency of occurrence and selectivity ratio values were determined. As a result, 200 genome sequence segments were identified. In most cases, the primers designed to hybridize with 100% complementarity to its corresponding genome sequence segment. In a few other cases, degenerate primers were prepared. The degenerate bases of the primers occur at positions complementary to positions having ambiguity within the target Bacillus anthracis genome or complementary to positions known or thought to be susceptible to single nucleotide polymorphisms. The 200 primers (Table 3) designed to hybridize to the genome sequence segments were found to have a combined total of 12822 hybridization sites. The mean separation distance of the genome sequence segments and the primers hybridizing thereto was found to be 815 nucleobases in length. The maximum distance between the genome sequence segments and the primers hybridizing thereto was found to be 5420 nucleobases in length. The mean “frequency bias” of hybridization of a primer to the target genome relative to the background genomes was calculated to be 3.3 1, indicating that the average primer hybridizes at 3.31 different positions on the target genome sequence for each single position it hybridizes to a background genome sequence.

[0278] In an experiment designed to test the efficiency of the targeted whole genome amplification reaction vs. traditional whole genome amplification, reactions were carried out using 50, 100, 200, and 400 femtograms of Bacillus anthracis Sterne genomic DNA in the presence of 100 nanograms of human genomic DNA. Amplified quantities of DNA were determined and it was found that the targeted whole genome amplification reactions resulted in much greater specificity toward amplification of Bacillus anthracis Sterne genomic DNA than human genomic DNA. FIG. 3A indicates that ordinary whole genome amplification using random primers 6 nucleobases in length under the conditions listed above results in production of larger quantities of human genomic DNA, as would be expected. FIG. 3B, on the other hand indicates that the 200 primers described above selectively amplify the Bacillus anthracis Sterne genomic DNA relative to the human DNA, even though the quantity of Bacillus anthracis Sterne genomic DNA was much lower than the human genomic DNA.

[0279] A second experiment was conducted where additional target genomes were selected for the primer design process. The group of total target genomes included the genomes of the following potential biowarfare agents: Bacillus anthracis, Francisella tularensis, Yersinia pestis, Brucella sp., Burkholderia mallei, Rickettsia prowazekii, and Escherichia coli 0157. The group of background genomes was expanded. An exact match BLAST was used to determine the frequency of occurrence of genome sequence segments in the background genomes. A larger number of genome sequence segments was analyzed and query 3 (FIG. 2—6000) was automated. The 200 primers designed in the first experiment are shown in Table 3 and the 191 primers designed in the second experiment are shown in Table 4. In Tables 3 and 4, an asterisk (*) indicates a phosphorothioate linkage and degenerate nucleobases codes are as follows: r=a or g; k=g or t; s=g or c; y=c or t; m=a or c, and w=a or t.

TABLE 3
First Generation Targeted Whole Genome
Amplification Primer Set

| Sequence | SEQ ID NO: |
|---|---|
| aaaaaagc*g*g | 203 |
| aaaacg*c*t | 204 |
| aaaagaagtt*a*t | 205 |
| aaaaggc*g*g | 206 |
| aaaccgc*c*a | 207 |
| aaaccgt*a*t | 208 |
| aaaccgt*t*a | 209 |
| aaagaagaag*t*t | 210 |
| aaagaagctt*t*a | 211 |
| aaagaagtat*t*a | 212 |
| aaagccg*a*t | 213 |
| aaagcgtggg*g*a | 214 |
| aaagtagaag*a*a | 215 |
| aaataacg*a*t | 216 |
| aaatacg*c*t | 217 |
| aaatcattaa*a*g | 218 |
| aaattag*c*g | 219 |
| aaccgcc*t*t | 220 |
| aacgat*t*g | 221 |
| aacgata*t*t | 222 |
| aacgctt*c*w | 223 |
| aacgtga*a*c | 224 |
| aacttctttt*t*c | 225 |
| aagaaac*g*c | 226 |
| aagarttaaa*a*g | 227 |
| aagataaaga*t*g | 228 |
| aagatgtaaa*a*g | 229 |
| aagcatctaa*g*c | 230 |
| aagcgat*c*a | 231 |
| aagcggt*t*c | 232 |
| aagtaac*g*a | 233 |
| aataacg*c*a | 234 |
| aatattggac*a*a | 235 |
| aatcattaat*a*t | 236 |
| aatccag*c*g | 237 |
| aatcgcc*c*a | 238 |
| aatcgta*t*c | 239 |
| aatcgtt*a*a | 240 |
| aatcgtt*g*c | 241 |
| aatctggtgg*t*a | 242 |
| aatgcg*g*t | 243 |
| aattaa*c*g | 244 |
| aatttcatct*a*a | 245 |
| accgata*a*t | 246 |
| accgcat*c*a | 247 |
| acgaatg*a*t | 248 |
| acgatgt*t*g | 249 |
| acggtta*t*c | 250 |
| acggttt*t*a | 251 |
| acgrtaa*a*a | 252 |
| acgttt*a*t | 253 |
| acttttttat*c*t | 254 |
| agaattatta*a*a | 255 |
| agataaa*c*g | 256 |
| agatgaaaat*g*g | 257 |
| agcaatc*g*c | 258 |
| agcagttgca*g*c | 259 |
| agcgcaa*t*c | 260 |
| agcttgt*t*g | 261 |
| agttgat*c*g | 262 |
| ataaaaaaag*c*g | 263 |
| ataaaaaagg*t*a | 264 |
| ataaagaaga*t*g | 265 |
| ataaagatat*t*a | 266 |
| ataacga*a*g | 267 |
| ataactaata*a*a | 268 |
| ataatagaag*a*a | 269 |
| ataccatttt*t*a | 270 |
| atacgat*a*a | 271 |
| atagatgaaa*a*t | 272 |
| atagcga*t*a | 273 |
| atatcgt*a*a | 274 |
| atatcttttt*c*a | 275 |
| atattaaa*g*c | 276 |
| atattgaaga*a*g | 277 |
| atattgat*a*c | 278 |
| atcagct*a*c | 279 |
| atcatgc*c*g | 280 |
| atcgcac*c*g | 281 |
| atcgcctt*c*a | 282 |
| atcgtaa*t*a | 283 |
| atcgtga*a*g | 284 |
| atcgtta*a*a | 285 |
| atcttca*c*g | 286 |
| atcttcttta*a*t | 287 |
| attaata*c*c | 288 |
| attacaa*c*g | 289 |
| attacaac*a*a | 290 |
| attacc*g*c | 291 |
| attagaagaa*a*t | 292 |
| attatc*g*g | 293 |
| attatcg*t*a | 294 |
| attcatc*g*g | 295 |
| attgatat*t*a | 296 |
| attgatataa*a*t | 297 |
| attgatgaa*g*c | 298 |
| attgatgatt*t*a | 299 |
| attgcagc*a*a | 300 |
| atttagataa*a*t | 301 |
| atttagatga*a*g | 302 |
| atttatca*g*c | 303 |
| atttattatt*a*g | 304 |
| atttctttat*c*a | 305 |
| caatcgg*t*g | 306 |
| caatcgy*t*a | 307 |
| cacctttttt*a*a | 308 |
| cagcgat*t*a | 309 |
| cagcttttt*t*a | 310 |
| catcgct*t*c | 311 |
| catctaaaat*a*a | 312 |
| catcttc*c*g | 313 |
| ccaatcg*g*c | 314 |
| cccgctt*c*a | 315 |
| ccggtaa*t*a | 316 |
| cgataat*g*a | 317 |
| cgattaa*a*g | 318 |
| cgattg*c*g | 319 |
| cgcctct*t*c | 320 |
| cgctaaa*t*a | 321 |
| cgcttta*t*a | 322 |
| cggcgcgctg*a*a | 323 |
| cggtatt*g*a | 324 |
| cgtaaag*a*a | 325 |
| cgtaaat*a*c | 326 |
| cgtgatc*a*a | 327 |
| cgtttat*t*a | 328 |
| cgwtaat*a*a | 329 |
| ctaattcttc*t*a | 330 |
| ctactttttc*c*a | 331 |
| ctgtagaaga*a*g | 332 |
| ctgttttaga*a*g | 333 |
| cttcacg*a*a | 334 |
| cttcatca*a*c | 335 |
| cttcatctaa*t*a | 336 |
| cttcttctaa*a*a | 337 |
| cttcttcttt*a*a | 338 |
| cttctttc*g*c | 339 |
| ctttagaaaa*t*a | 340 |
| ctttatataa*a*r | 341 |
| ctttatcaat*a*a | 342 |
| ctttcgct*t*c | 343 |
| cttttatata*a*a | 344 |
| ctttttcwtc*t*a | 345 |
| gaaaaaggat*t*a | 346 |
| gaaacga*t*c | 347 |
| gaaacgt*t*a | 348 |
| gaaattgctg*a*c | 349 |
| gaagaagyga*a*a | 350 |
| gaagatgaaa*a*a | 351 |
| gaagatttat*t*a | 352 |
| gaagtattaa*a*a | 353 |
| gaatatgaag*a*a | 354 |
| gatattgata*a*a | 355 |
| gatgaagata*a*a | 356 |
| gatttattat*t*a | 357 |
| gatttcacga*a*a | 358 |
| gcaata*a*c | 359 |
| gccttt*a*c | 360 |
| gcgaaag*a*a | 361 |
| gcgattt*t*a | 362 |
| gcggtat*t*a | 363 |
| gcgttaa*t*a | 364 |
| gcgttta*a*a | 365 |
| gcgtttt*g*a | 366 |
| gckgatt*t*a | 367 |
| gctaaaaaag*a*a | 368 |
| gctattttat*t*a | 369 |
| gctcgcgcga*c*a | 370 |
| gcttctttta*t*a | 371 |
| gctttttcat*c*a | 372 |
| ggcatt*a*c | 373 |
| ggcggta*a*a | 374 |
| ggttgaa*a*c | 375 |
| ggttta*a*c | 376 |
| gtaaaac*g*a | 377 |
| gtaaagcttt*c*a | 378 |
| gtgacga*a*a | 379 |
| gttatcg*c*a | 380 |
| gttgttttac*c*a | 381 |
| sttccgc*a*a | 382 |
| taaaatgggt*g*a | 383 |
| taaagcaatt*a*a | 384 |
| taaatcatct*a*a | 385 |
| taacgaa*g*a | 386 |
| taactcttct*a*a | 387 |
| taatgctt*c*a | 388 |
| tacatcat*c*a | 389 |
| tatcatc*g*a | 390 |
| tatcattaat*a*a | 391 |
| tatcctcttc*c*a | 392 |
| tcttctaata*a*a | 393 |
| tcttctaatt*c*a | 394 |
| tcttcttcta*a*a | 395 |
| tcttttttta*c*a | 396 |
| tgacgat*a*a | 397 |
| tgatgcg*a*a | 398 |
| tgcttctttt*a*a | 399 |
| ttagatgaag*a*a | 400 |
| ttagctaaag*a*a | 401 |
| ttattagaag*a*a | 402 |

TABLE 4
Second Generation Targeted Whole Genome
Amplification Primer Set

| Sequence | SEQ ID NO: |
|---|---|
| aaaacaat*t*g | 403 |
| aaaacgtt*t*a | 404 |
| aaaagaat*t*a | 405 |
| aaaaggta*t*t | 406 |
| aaaaggtg*a*a | 407 |
| aaataacg*a*t | 216 |
| aaatcgttga*t*a | 409 |
| aaatggtga*a*g | 410 |
| aacaccaa*t*t | 411 |
| aacgaaag*a*t | 412 |
| aacgaaagaa*g*a | 413 |
| aacgaat*a*a | 414 |
| aagaagcga*a*g | 415 |
| aagaagtaaa*a*g | 416 |
| aagcg*g*a | 417 |
| aatcgc*t*a | 418 |
| aatcgcaa*t*t | 419 |
| aatcgcygat*a*t | 420 |
| aatcgttt*c*a | 421 |
| acaacga*t*t | 422 |
| accgataa*t*a | 423 |
| acgaagc*a*a | 424 |
| agaagcgat*g*a | 425 |
| agcgaaaga*a*g | 426 |
| atacga*t*g | 427 |
| atacgg*a*a | 428 |
| atataaaa*g*a | 429 |
| atatg*c*g | 430 |
| atattatc*g*t | 431 |
| atcarcgatt*t*t | 432 |
| atcata*c*g | 433 |
| atccgt*t*a | 434 |
| atgaag*c*g | 435 |
| atgtaac*g*a | 436 |
| attaaagat*g*g | 437 |
| attaac*g*c | 438 |
| attacaaa*a*g | 439 |
| attacgat*a*a | 440 |
| attacgt*t*a | 441 |
| attacttg*t*a | 442 |
| attatatg*a*a | 443 |
| attattat*c*g | 444 |
| attgaaaaag*c*a | 445 |
| attgaaac*g*a | 446 |
| attgcttc*t*t | 447 |
| attgtcg*t*t | 448 |
| atttatcg*t*a | 449 |
| caacttct*t*t | 450 |
| caatcgt*a*t | 451 |
| caattaat*a*c | 452 |
| caattgga*a*t | 453 |
| caccaatt*a*c | 454 |
| caccaatt*g*t | 455 |
| cacctttta*c*a | 456 |
| catacg*a*a | 457 |
| catataa*c*g | 458 |
| catcaattg*t*t | 459 |
| ccgct*t*t | 460 |
| cgacttaccg*a*c | 461 |
| cgata*a*c | 462 |
| cgataaag*a*a | 463 |
| cgatataat*t*t | 464 |
| cgatg*t*a | 465 |
| cgattga*a*g | 466 |
| cgatttttc*a*a | 467 |
| cgcaa*t*a | 468 |
| cgcttttta*t*t | 469 |
| cggat*a*t | 470 |
| cggtaa*a*t | 471 |
| cggttta*a*t | 472 |
| cgtaat*a*t | 473 |
| cgtata*a*c | 474 |
| cgttaat*t*g | 475 |
| cgttatg*a*a | 476 |
| ctatcg*t*a | 477 |
| ctgattaaag*t*t | 478 |
| cttccata*a*t | 479 |
| cttcgt*a*a | 480 |
| cttctata*t*a | 481 |
| cttctgca*a*t | 482 |
| cttcttca*c*g | 483 |
| cttcttcttt*c*g | 484 |
| cttcttta*a*t | 485 |
| cttctttc*g*c | 339 |
| cttctttcg*g*a | 487 |
| ctttcgct*t*t | 488 |
| ctttcgcttc*t*t | 489 |
| cttttaattc*t*t | 490 |
| cttttgtaa*t*a | 491 |
| ctttttcg*t*a | 492 |
| cttttttc*a*t | 493 |
| ctttttya*t*c | 494 |
| gaaacgat*t*g | 495 |
| gaagaagcga*a*a | 496 |
| gaagaagt*a*a | 497 |
| gaagaagta*g*c | 498 |
| gatacgaa*a*g | 499 |
| gatgaatt*a*g | 500 |
| gatta*c*g | 501 |
| gattaaagtt*t*c | 502 |
| gcaattgaaa*a*a | 503 |
| gcaattgt*a*t | 504 |
| gcaattgt*t*g | 505 |
| gcgaaagaa*g*c | 506 |
| gcgtaa*t*a | 507 |
| gctacttt*a*t | 508 |
| gcttcttt*c*g | 509 |
| gcttttttta*t*t | 510 |
| gtattaaaa*g*a | 511 |
| gttaattg*a*a | 512 |
| gttcg*t*a | 513 |
| gttgc*g*a | 514 |
| taaagataa*t*g | 515 |
| taaagcg*t*t | 516 |
| taaagtgaaa*c*t | 517 |
| taaatcttc*t*a | 518 |
| taacagaa*g*a | 519 |
| taacgaaaga*a*g | 520 |
| taacgga*a*a | 521 |
| taactcttc*t*t | 522 |
| taatam*c*g | 523 |
| taatcg*y*a | 524 |
| taatgaag*a*a | 525 |
| taattgct*t*c | 526 |
| tacaattt*c*a | 527 |
| taccgt*t*a | 528 |
| tacgaaaga*a*g | 529 |
| tacgaatg*a*t | 530 |
| tactcg*t*t | 531 |
| tagaagaa*g*t | 532 |
| tagaagaag*c*g | 533 |
| tagaagc*g*a | 534 |
| tatatcgact*t*a | 535 |
| tatatcrgcg*a*t | 536 |
| tatcggcgat*t*t | 537 |
| tatgtaa*c*g | 538 |
| tattag*c*g | 539 |
| tattcg*c*t | 540 |
| tattgatg*a*a | 541 |
| tawtacga*a*a | 542 |
| tcaattgc*a*a | 543 |
| tcaattgct*t*c | 544 |
| tcattac*g*a | 545 |
| tccaattg*a*a | 546 |
| tccgaaag*a*a | 547 |
| tccgct*a*a | 548 |
| tccgt*a*t | 549 |
| tcctgtta*c*a | 550 |
| tcgca*t*a | 551 |
| tcgcttta*t*t | 552 |
| tcgtat*t*g | 553 |
| tcgttaca*a*t | 554 |
| tctacaat*t*a | 555 |
| tctactaa*t*t | 556 |
| tcttcaat*a*t | 557 |
| tcttctaa*c*g | 558 |
| tctttata*t*g | 559 |
| tctttatat*t*c | 560 |
| tctttcgc*t*a | 561 |
| tcttttttc*g*c | 562 |
| tgaaaaag*c*g | 563 |
| tgaaacaat*t*g | 564 |
| tgaaacga*a*t | 565 |
| tgaagcga*t*t | 566 |
| tgcaa*c*g | 567 |
| tgcgaaaga*a*a | 568 |
| tgcttcttc*t*a | 569 |
| tgtaaaag*g*t | 570 |
| tgtcggtaag*t*c | 571 |
| tgttctttc*g*t | 572 |
| ttaacgaaa*g*a | 573 |
| ttaacgg*a*a | 574 |
| ttacgaaa*g*a | 575 |
| ttagaaga*t*g | 576 |
| ttattatc*g*g | 577 |
| ttcaata*c*g | 578 |
| ttcacgaa*t*a | 579 |
| ttccgt*a*a | 580 |
| ttcgtaaa*t*t | 581 |
| ttcttta*c*g | 582 |
| ttctttcg*c*a | 583 |
| ttctttcgtt*a*a | 584 |
| ttctttta*t*a | 585 |
| ttgcaatt*g*c | 586 |
| ttgtaatt*g*g | 587 |
| ttgtcggta*a*g | 588 |
| tttattaga*t*g | 589 |
| tttcgtat*a*t | 590 |
| tttcgtta*t*a | 591 |
| tttwtcgt*a*a | 592 |
| twacgat*t*g | 593 |

[0280] Table 5 shows a comparison of statistics obtained from the first and second experiments. The statistics indicate the likelihood that more selective and efficient priming of the target Bacillus anthracis genome would be expected under the conditions of the second generation proof-of-concept experiment.

TABLE 5
Statistical Comparison of First and Second Experiments

| | First | Second |
|---|---|---|
| | Generation | Generation |
| Statistic | Experiment | Experiment |
| Total Frequency of Occurrence of all | 12822 | 25822 |
| Selected Genome Sequence Segments | | |
| Mean Separation Distance Between | 815 | 404 |
| Selected Genome Sequence Segments | | |
| Maximum Separation Distance Between | 5420 | 3477 |
| Selected Genome Sequence Segments | | |
| Average Frequency Bias to Target | 3.31 | 4.67 |
| Genome Over Background Genomes | | |

[0281] The results of the second generation experiment are shown in FIGS. 4A and 4B. It is readily apparent that the modifications to the selection process added in the second experiment result in a more efficient targeted whole genome amplification reaction which is biased toward amplification of the Bacillus anthracis target genome. The primers of Table 4 produce less human DNA and more Bacillus anthracis DNA than the traditional whole genome amplification (WGA) and the first generation primer set (Table 3). Furthermore, the frequency bias was found to be even higher for the remaining target genomes as shown in Table 6.

TABLE 6
Statistical Comparison of Genome Sequence Segments
for the Target Genomes of the Second Experiment

| | Total | | Maximum | |
|---|---|---|---|---|
| | Frequency of | Mean | Distance | Mean |
| | Occurrence | Separation | Between | Frequency |
| Target Genome | of Segments | Distance | Segments | Bias |
| Bacillus anthracis | 25822 | 404.84 | 3477 | 4.67 |
| Rickettsia prowazekii | 5606 | 396.41 | 2265 | 5.44 |
| Escherichia coli | 23501 | 467.89 | 4822 | 22.70 |
| Yersinia pestis | 18597 | 500.43 | 4616 | 35.69 |
| Brucella sp. | 13442 | 490.10 | 3527 | 41.96 |
| Francisella tularensis | 7925 | 477.56 | 3179 | 50.08 |
| Burkholderia mallei | 25218 | 462.73 | 4062 | 291.13 |

### Example 4

### Targeted Whole Genome Amplification Protocol

[0282] The targeted whole genome amplification reaction mixture consisted of: 5 microliters of template DNA, and 0.04025 M TRIS HCl, 0.00975 M TRIS base, 0.012 M MgCl₂, 0.01 M (NH₄)₂SO₄, 0.8 M betaine, 0.8 M trehalose, 25 mM of each deoxynucleotide triphosphate (Bioline, Randolph, Mass., U.S.A), 0.004 M dithiothreitol, 0.05 mM of primers of the selected primer set, and 0.5 units of Phi29 polymerase enzyme per microliter of reaction mixture. The thermal cycling conditions for the amplification reaction were as follows: 1. 30° C. for 4 minutes 2. 15° C. for 15 seconds 3. repeat steps 1 and 2.times.150 4. hold at 95° C. for 10 minutes 5. hold at 4° C. until ready for analysis.

### Example 5

### Targeted Whole Genome Amplification of Sepsis-Causing Microorganisms

[0283] This example is directed toward design of a kit for targeted whole genome amplification of organisms which are known to cause sepsis. A collection of target genomes is assembled, comprising the genomes of the following microorganisms known to cause bloodstream infections: Escherichia coli, Klebsiella pneumoniae, Klebsiella oxytoca, Serratia marcescens, Enterobacter cloacae, Enterobacter aerogenes, Proteus mirabilis, Pseudomonas aeruginosa, Acinetobacter baumannii, Stenotrophomonas maltophilia, Staphylococcus aureus, Staphylococcus epidermidis, Staphylococcus haemolyticus, Streptococcus pneumoniae, Streptococcus pyogenes, Streptococcus agalactiae, Streptococcus mitis, Enterococcus faecium, Enterococcus faecalis, Candida albicans, Candida tropicalis, Candida parapsilosis, Candida krusei, Candida glabrata and Aspergillus fumigatus. Because the healthy human bloodstream generally does not contain microorganisms or parasites, only the human genome is chosen as a single background genome. Alternatively, if a human was known to be infected with a virus such as HIV or HCV for example, the genomes of HIV or HCV could be included as background genomes during the primer design process. Genomes commonly found in the human bloodstream are considered background genomes.

[0284] The target and background genomes are obtained from a genomics database such as GenBank. The target genomes are scanned by a computer program to identify all unique genome sequence segments between 5 and 13 nucleobases in length. The computer program further determines and records the frequency of occurrence of each of the unique genome sequence segments within each of the target genomes.

[0285] The human genome is then scanned to determine the frequency of occurrence of the genome sequence segments. Optionally, the entire list of genome sequence segments is reduced by removing genome sequence segments that have low frequencies of occurrence by choosing an arbitrary frequency of occurrence threshold criterion such as, for example, the mean frequency of occurrence or any frequency of occurrence 25% above or below the mean frequency of occurrence or any whole or fractional percentage therebetween. For example, if the mean frequency of occurrence is 100, 25% above 100 equals 125 and 25% below 100 equals 75 and the frequency of occurrence threshold criterion may be any whole or fractional number between about 75 and about 125. When this step is complete, a subset of the original list of unique genome sequence segments remains. At this point, the subset of genome sequence subsets is analyzed by the computer program to determine the frequency of occurrence of each of the genome sequence segments within the human genome. Upon completion of this step, the genome sequence segments of the subset are associated with the following data; the frequency of occurrence within each of the target genomes and the frequency of occurrence within the human genome. A value indicating the total target frequency of occurrence is calculated by adding the frequency of occurrence of the genome sequence segments in each of the target genomes. The selectivity ratio is calculated by the computer program for the genome sequence segments of the subset by dividing the total target frequency of occurrence by the background frequency of occurrence. When the series of selectivity ratio calculations are complete, the genome sequence segments are ranked by their selectivity ratio values such that the highest selectivity ratio receives the highest rank. The ranked genome sequence segments are then subjected to the process described Example 2 and illustrated in FIG. 2.

[0286] The process of Example 2 and FIG. 2 ends when the pre-determined quantity of 200 genome sequence segments is reached and when the stopping criteria are met. The stopping criteria are the following: the mean distance between the selected genome sequence segments on the target genomes is less than 500 nucleobases and the maximum distance between the selected genome sequence segments on the target genomes is less than 5000 nucleobases. These values are calculated by the computer program from the known coordinates of the target genomes and the selected genome sequence segments.

[0287] The primer design step begins after completion of the selection process of the genome sequence segments. The genome sequence segments represent primer hybridization sites and a primer is designed to bind to each of the selected genome sequence segments. For an initial round of primer design and testing, primers are designed to be 100% complementary to each of the selected genome sequence segments. Optionally, the primers can be subjected to an in silico analysis to determine if they unfavorable characteristics. Unfavorable characteristics may include poor affinity (as measured by melting temperature) for their corresponding target genome sequence segment, primer dimer formation, or presence of secondary structure. Upon identification of unfavorable characteristics in a given primer, the primer is redesigned by alteration of length or by incorporation of modified nucleobases.

[0288] Once primer design (and redesign if necessary) is complete, the primers are synthesized and subjected to in vitro testing by amplification of the target genomes in the presence of human DNA (representing the background human genome) to determine the amplification efficiency and bias toward the target genomes. Analyses such as those shown in FIGS. 3 and 4 are useful for determining these measures. In addition, analyses of statistics such as those shown in Table 6 are useful for obtaining an estimation of bias toward the target genomes relative to the background human genome.

[0289] When the primer design and testing is complete, kits are assembled. The kits contain the primers, deoxynucleotide triphosphates, a processive polymerase, buffers and additives useful for improving the yield of amplified genomes. These kits are used to amplify genomic DNA of sepsis-causing organisms from blood samples of individuals exhibiting symptoms of sepsis. The amplified DNA is then available for further testing for the purpose of genotyping. Such tests include real-time PCR, microarray analysis and triangulation genotyping analysis by mass spectrometry of bioagent identifying amplicons as described herein (Examples 6-12). Additionally, genotyping of sepsis-causing organisms is useful in determining an appropriate course of treatment with antibiotics and alerting authorities of the presence of potentially drug-resistant strains of sepsis-causing organisms. Such genotyping analyses can be developed using methods described herein as well as those disclosed in commonly owned U.S. application Ser. No. 11/409,535 which is incorporated herein by reference in entirety.

### Example 6

### Design and Validation of Primer Pairs that Define Bioagent Identifying Amplicons for Identification of Bacteria

[0290] For design of primers that define bacterial bioagent identifying amplicons, a series of bacterial genome segment sequences are obtained, aligned and scanned for regions where pairs of PCR primers would amplify products of about 39 to about 200 nucleotides in length and distinguish subgroups and/or individual strains from each other by their molecular masses or base compositions. A typical process shown in FIG. 8 is employed for this type of analysis. A database of expected base compositions for each primer region is generated using an in silico PCR search algorithm, such as (ePCR). An existing RNA structure search algorithm (Macke et al., Nucl. Acids Res., 2001, 29, 4724-4735, which is incorporated herein by reference in its entirety) has been modified to include PCR parameters such as hybridization conditions, mismatches, and thermodynamic calculations (Santa Lucia, Proc. Natl. Acad. Sci. U.S.A., 1998, 95, 1460-1465, which is incorporated herein by reference in its entirety). This also provides information on primer specificity of the selected primer pairs. An example of a collection of such primer pairs is disclosed in U.S. application Ser. No. 11/409,535 which is incorporated herein by reference in entirety.

### Example 7

### Sample Preparation and PCR

[0291] Genomic DNA id prepared from samples using the DNeasy Tissue Kit (Qiagen, Valencia, Calif.) according to the manufacturer's protocols.

[0292] PCR reactions are assembled in 50 μL reaction volumes in a 96-well microtiter plate format using a Packard MPII liquid handling robotic platform and M. J. Dyad thermocyclers (MJ research, Waltham, Mass.) or Eppendorf Mastercycler thermocyclers (Eppendorf, Westbury, N.Y.). The PCR reaction mixture includes of 4 units of Amplitaq Gold, 1× buffer II (Applied Biosystems, Foster City, Calif.), 1.5 mM MgCl₂, 0.4 M betaine, 800 μM dNTP mixture and 250 nM of each primer. The following typical PCR conditions are used: 95° C. for 10 min followed by 8 cycles of 95° C. for 30 seconds, 48° C. for 30 seconds, and 72° C. 30 seconds with the 48° C. annealing temperature increasing 0.9° C. with each of the eight cycles, The PCR reaction is then continued for 37 additional cycles of 95° C. for 15 seconds, 56° C. for 20 seconds, and 72° C. 20 seconds.

### Example 8

### Purification of PCR Products for Mass Spectrometry with Ion Exchange Resin-Magnetic Beads

[0293] For solution capture of nucleic acids with ion exchange resin linked to magnetic beads, 25 μl of a 2.5 mg/mL suspension of BioClone amine-terminated superparamagnetic beads is added to 25 to 50 μl of a PCR (or RT-PCR) reaction containing approximately 10 pM of a typical PCR amplification product. The above suspension is mixed for approximately 5 minutes by vortexing or pipetting, after which the liquid is removed after using a magnetic separator. The beads containing bound PCR amplification product are then washed three times with 50 mM ammonium bicarbonate/50% MeOH or 100 mM ammonium bicarbonate/50% MeOH, followed by three more washes with 50% MeOH. The bound PCR amplification product is eluted with a solution of 25 mM piperidine, 25 mM imidazole, 35% MeOH which includes peptide calibration standards.

### Example 9

### Mass Spectrometry and Base Composition Analysis

[0294] The ESI-FTICR mass spectrometer is based on a Bruker Daltonics (Billerica, Mass.) Apex II 70e electrospray ionization Fourier transform ion cyclotron resonance mass spectrometer that employs an actively shielded 7 Tesla superconducting magnet. The active shielding constrains the majority of the fringing magnetic field from the superconducting magnet to a relatively small volume. Thus, components that might be adversely affected by stray magnetic fields, such as CRT monitors, robotic components, and other electronics, can operate in close proximity to the FTICR spectrometer. All aspects of pulse sequence control and data acquisition were performed on a 600 MHz Pentium II data station running Bruker's Xmass software under Windows NT 4.0 operating system. Sample aliquots, typically 15 μl, are extracted directly from 96-well microtiter plates using a CTC HTS PAL autosampler (LEAP Technologies, Carrboro, N.C.) triggered by the FTICR data station. Samples are injected directly into a 10 μl sample loop integrated with a fluidics handling system that supplies the 100 μl/hr flow rate to the ESI source. Ions are formed via electrospray ionization in a modified Analytica (Branford, Conn.) source employing an off axis, grounded electrospray probe positioned approximately 1.5 cm from the metallized terminus of a glass desolvation capillary. The atmospheric pressure end of the glass capillary is biased at 6000 V relative to the ESI needle during data acquisition. A counter-current flow of dry N₂ is employed to assist in the desolvation process. Ions are accumulated in an external ion reservoir comprised of an rf-only hexapole, a skimmer cone, and an auxiliary gate electrode, prior to injection into the trapped ion cell where they are mass analyzed. Ionization duty cycles greater than 99% are achieved by simultaneously accumulating ions in the external ion reservoir during ion detection. Each detection event includes 1M data points digitized over 2.3 s. To improve the signal-to-noise ratio (S/N), 32 scans are co-added for a total data acquisition time of 74 s.

[0295] The ESI-TOF mass spectrometer is based on a Bruker Daltonics MicroTOF™. Ions from the ESI source undergo orthogonal ion extraction and are focused in a reflectron prior to detection. The TOF and FTICR are equipped with the same automated sample handling and fluidics described above. Ions are formed in the standard MicroTOF™ ESI source that is equipped with the same off-axis sprayer and glass capillary as the FTICR ESI source. Consequently, source conditions were the same as those described above. External ion accumulation is also employed to improve ionization duty cycle during data acquisition. Each detection event on the TOF includes 75,000 data points digitized over 75 μs.

The sample delivery scheme allows sample aliquots to be rapidly injected into the electrospray source at high flow rate and subsequently be electrosprayed at a much lower flow rate for improved ESI sensitivity. Prior to injecting a sample, a bolus of buffer is injected at a high flow rate to rinse the transfer line and spray needle to avoid sample contamination/carryover. Following the rinse step, the autosampler injects the next sample and the flow rate is switched to low flow. Following a brief equilibration delay, data acquisition commenced. As spectra are co-added, the autosampler continued rinsing the syringe and picking up buffer to rinse the injector and sample transfer line. In general, two syringe rinses and one injector rinse are required to minimize sample carryover. During a routine screening protocol a new sample mixture is injected every 106 seconds. More recently a fast wash station for the syringe needle has been implemented which, when combined with shorter acquisition times, facilitates the acquisition of mass spectra at a rate of just under one spectrum/minute.

[0296] Raw mass spectra are post-calibrated with an internal mass standard and deconvoluted to monoisotopic molecular masses. Unambiguous base compositions are derived from the exact mass measurements of the complementary single-stranded oligonucleotides. Quantitative results are obtained by comparing the peak heights with an internal PCR calibration standard present in every PCR well at 500 molecules per well. Calibration methods are commonly owned and disclosed in PCT Publication Number WO 2005/098047 which is incorporated herein by reference in entirety.

### Example 10

### De Novo Determination of Base Composition of Amplification Products Using Molecular Mass Modified Deoxynucleotide Triphosphates

[0297] Because the molecular masses of the four natural nucleobases have a relatively narrow molecular mass range (A=313.058, G=329.052, C=289.046, T=304.046—See Table 7), a persistent source of ambiguity in assignment of base composition can occur as follows: two nucleic acid strands having different base composition may have a difference of about 1 Da when the base composition difference between the two strands is G⇄A (−15.994) combined with C⇄T (+15.000). For example, one 99-mer nucleic acid strand having a base composition of A₂₇G₃₀C₂₁T₂₁ has a theoretical molecular mass of 30779.058 while another 99-mer nucleic acid strand having a base composition of A₂₆G₃₁C₂₂T₂₀ has a theoretical molecular mass of 30780.052. A 1 Da difference in molecular mass may be within the experimental error of a molecular mass measurement and thus, the relatively narrow molecular mass range of the four natural nucleobases imposes an uncertainty factor.

[0298] The methods provide for a means for removing this theoretical 1 Da uncertainty factor through amplification of a nucleic acid with one mass-tagged nucleobase and three natural nucleobases. The term “nucleobase” as used herein is synonymous with other terms in use in the art including “nucleotide,” “deoxynucleotide,” “nucleotide residue,” “deoxynucleotide residue,” “nucleotide triphosphate (NTP),” or deoxynucleotide triphosphate (dNTP).

Addition of significant mass to one of the 4 nucleobases (dNTPs) in an amplification reaction, or in the primers themselves, will result in a significant difference in mass of the resulting amplification product (significantly greater than 1 Da) arising from ambiguities arising from the G⇄A combined with C⇄T event (Table 7). Thus, the same the G⇄A (−15.994) event combined with 5-Iodo-C⇄T (−110.900) event would result in a molecular mass difference of 126.894. If the molecular mass of the base composition A₂₇G₃₀-5-Iodo-C₂₁T₂₁ (33422.958) is compared with A₂₆G₃₁-5-Iodo-C₂₂T₂₀, (33549.852) the theoretical molecular mass difference is +126.894. The experimental error of a molecular mass measurement is not significant with regard to this molecular mass difference. Furthermore, the only base composition consistent with a measured molecular mass of the 99-mer nucleic acid is A₂₇G₃₀-5-Iodo-C₂₁T₂₁. In contrast, the analogous amplification without the mass tag has 18 possible base compositions.

TABLE 7
Molecular Masses of Natural Nucleobases and the
Mass-Modified Nucleobase 5-Iodo-C and Molecular
Mass Differences Resulting from Transitions

| Nucleobase | Molecular Mass | Transition | Δ Molecular Mass |
|---|---|---|---|
| A | 313.058 | A-->T | −9.012 |
| A | 313.058 | A-->C | −24.012 |
| A | 313.058 | A-->5-Iodo-C | 101.888 |
| A | 313.058 | A-->G | 15.994 |
| T | 304.046 | T-->A | 9.012 |
| T | 304.046 | T-->C | −15.000 |
| T | 304.046 | T-->5-Iodo-C | 110.900 |
| T | 304.046 | T-->G | 25.006 |
| C | 289.046 | C-->A | 24.012 |
| C | 289.046 | C-->T | 15.000 |
| C | 289.046 | C-->G | 40.006 |
| 5-Iodo-C | 414.946 | 5-Iodo-C-->A | −101.888 |
| 5-Iodo-C | 414.946 | 5-Iodo-C-->T | −110.900 |
| 5-Iodo-C | 414.946 | 5-Iodo-C-->G | −85.894 |
| G | 329.052 | G-->A | −15.994 |
| G | 329.052 | G-->T | −25.006 |
| G | 329.052 | G-->C | −40.006 |
| G | 329.052 | G-->5-Iodo-C | 85.894 |

[0299] Mass spectra of bioagent-identifying amplicons are analyzed independently using a maximum-likelihood processor, such as is widely used in radar signal processing. This processor, referred to as GenX, first makes maximum likelihood estimates of the input to the mass spectrometer for each primer by running matched filters for each base composition aggregate on the input data. This includes the GenX response to a calibrant for each primer.

[0300] The algorithm emphasizes performance predictions culminating in probability-of-detection versus probability-of-false-alarm plots for conditions involving complex backgrounds of naturally occurring organisms and environmental contaminants. Matched filters consist of a priori expectations of signal values given the set of primers used for each of the bioagents. A genomic sequence database is used to define the mass base count matched filters. The database contains the sequences of known bacterial bioagents and includes threat organisms as well as benign background organisms. The latter is used to estimate and subtract the spectral signature produced by the background organisms. A maximum likelihood detection of known background organisms is implemented using matched filters and a running-sum estimate of the noise covariance. Background signal strengths are estimated and used along with the matched filters to form signatures which are then subtracted. The maximum likelihood process is applied to this “cleaned up” data in a similar manner employing matched filters for the organisms and a running-sum estimate of the noise-covariance for the cleaned up data.

[0301] The amplitudes of all base compositions of bioagent-identifying amplicons for each primer are calibrated and a final maximum likelihood amplitude estimate per organism is made based upon the multiple single primer estimates. Models of all system noise are factored into this two-stage maximum likelihood calculation. The processor reports the number of molecules of each base composition contained in the spectra. The quantity of amplification product corresponding to the appropriate primer set is reported as well as the quantities of primers remaining upon completion of the amplification reaction.

[0302] Base count blurring can be carried out as follows. “Electronic PCR” can be conducted on nucleotide sequences of the desired bioagents to obtain the different expected base counts that could be obtained for each primer pair. See for example, ncbi.nlm.nih.gov/sutils/e-pcr/; Schuler, Genome Res. 7:541-50, 1997. In one illustrative embodiment, one or more spreadsheets, such as Microsoft Excel workbooks contain a plurality of worksheets. First in this example, there is a worksheet with a name similar to the workbook name; this worksheet contains the raw electronic PCR data. Second, there is a worksheet named “filtered bioagents base count” that contains bioagent name and base count; there is a separate record for each strain after removing sequences that are not identified with a genus and species and removing all sequences for bioagents with less than 10 strains. Third, there is a worksheet that contains the frequency of substitutions, insertions, or deletions for this primer pair. This data is generated by first creating a pivot table from the data in the “filtered bioagents base count” worksheet and then executing an Excel VBA macro. The macro creates a table of differences in base counts for bioagents of the same species, but different strains. One of ordinary skill in the art may understand additional pathways for obtaining similar table differences without undo experimentation.

[0303] Application of an exemplary script, involves the user defining a threshold that specifies the fraction of the strains that are represented by the reference set of base counts for each bioagent. The reference set of base counts for each bioagent may contain as many different base counts as are needed to meet or exceed the threshold. The set of reference base counts is defined by taking the most abundant strain's base type composition and adding it to the reference set and then the next most abundant strain's base type composition is added until the threshold is met or exceeded. The current set of data was obtained using a threshold of 55%, which was obtained empirically.

[0304] For each base count not included in the reference base count set for that bioagent, the script then proceeds to determine the manner in which the current base count differs from each of the base counts in the reference set. This difference may be represented as a combination of substitutions, Si=Xi, and insertions, Ii=Yi, or deletions, Di=Zi. If there is more than one reference base count, then the reported difference is chosen using rules that aim to minimize the number of changes and, in instances with the same number of changes, minimize the number of insertions or deletions. Therefore, the primary rule is to identify the difference with the minimum sum (Xi+Yi) or (Xi+Zi), e.g., one insertion rather than two substitutions. If there are two or more differences with the minimum sum, then the one that will be reported is the one that contains the most substitutions.

[0305] Differences between a base count and a reference composition are categorized as one, two, or more substitutions, one, two, or more insertions, one, two, or more deletions, and combinations of substitutions and insertions or deletions. The different classes of nucleobase changes and their probabilities of occurrence have been delineated in U.S. Patent Application Publication No. 2004209260 which is incorporated herein by reference in entirety.

### Example 11

### Selection and Use of Primer Pairs for Identification of Species of Bacteria Involved in Sepsis

[0306] In this example, identification of bacteria known to cause sepsis was accomplished using a panel of primer pairs chosen specifically with the aim of identifying these bacteria (Table 8). In this current example, the more specific group of bacteria known to be involved in causing sepsis is to be surveyed. Therefore, in development of this current panel of primer pairs, certain established surveillance primer pairs of U.S. application Ser. No. 11/409,535 have been combined with an additional primer pair, primer pair number 2249. The primer members of primer pair 2249 hybridize to the tufB gene and produce a bioagent identifying amplicon for members of the family Staphylococcaceae which includes the genus Staphylococcus.

TABLE 8
Names of Primer Pairs in Panel for Characterization
of Septicemia Pathogens

| | | | Forward | | | Reverse |
|---|---|---|---|---|---|---|
| Primer | | Forward | Primer | | Reverse | Primer |
| Pair | Forward | Primer | (SEQ ID | Reverse | Primer | (SEQ ID |
| No. | Primer Name | Sequence | NO:) | Primer Name | Sequence | NO:) |
| 346 | 16S_EC_713_{—} | TAGAACACCG | 594 | 16S_EC_789_{—} | TCGTGGACT | 602 |
| | 732_TMOD_F | ATGGCGAAGGC | | 809_TMOD_R | ACCAGGGT | |
| | | | | | ATCTA | |
| 348 | 16S_EC_785_{—} | TTTCGATGCA | 595 | 16S_EC_880_{—} | TACGAGCTG | 603 |
| | 806_TMOD_F | ACGCGAAGA | | 897_TMOD_R | ACGACAGC | |
| | | ACCT | | | CATG | |
| 349 | 23S_EC_1826_{—} | TCTGACACCT | 596 | 23S_EC_1906_{—} | TGACCGTT | 604 |
| | 1843_TMOD_F | GCCCGGTGC | | 1924_TMOD_R | ATAGTTAC | |
| | | | | | GGCC | |
| 354 | RPOC_EC_{—} | TCTGGCAGGT | 597 | RPOC_EC_{—} | TCGCACCG | 605 |
| | 2218_2241_{—} | ATGCGTGGTC | | 2313_2337_{—} | TGGGTTGAG | |
| | TMOD_F | TGATG | | TMOD_R | ATGAAGTAC | |
| 358 | VALS_EC_{—} | TCGTGGCGGCG | 598 | VALS_EC_{—} | TCGGTACGA | 606 |
| | 1105_1124_{—} | TGGTTATCGA | | 1195_1218_{—} | ACTGGATGT | |
| | TMOD_F | | | TMOD_R | CGCCGTT | |
| 359 | RPOB_EC_{—} | TTATCGCTCAGG | 599 | RPOB_EC_{—} | TGCTGGATT | 607 |
| | 1845_1866_{—} | CGAACTCCAAC | | 1909_1929_{—} | CGCCTTTG | |
| | TMOD_F | | | TMOD_R | CTACG | |
| 449 | RPLB_EC_{—} | TCCACACGGTG | 600 | RPLB_EC_{—} | TGTGCTGGT | 608 |
| | 690_710_F | GTGGTGAAGG | | 737_758_R | TTACCCCA | |
| | | | | | TGGAG | |
| 2249 | TUFB_{—} | TGAACGTGGTC | 601 | TUFB_{—} | TGTCACCAG | 609 |
| | NC002758- | AAATCAAAGTT | | NC002758- | CTTCAGCGTA | |
| | 615038-616222_{—} | GGTGAAGA | | 615038-616222_{—} | GTCTAATAA | |
| | 696_725_F | | | 793_820_R | | |

[0307] To test for potential interference of human DNA with the present assay, varying amounts of bacterial DNA from E. coli 0157 and E. coli K-12 were spiked into samples of human DNA at various concentration levels. Amplification was carried out using primer pairs 346, 348, 349, 354, 358 and 359 and the amplified samples were subjected to gel electrophoresis. Smearing was absent on the gel, indicating that the primer pairs are specific for amplification of the bacterial DNA and that performance of the primer pairs is not appreciably affected in the presence of high levels of human DNA such as would be expected in blood samples. Measurement of the amplification products indicated that E. coli 0157 could be distinguished from E. coli K-12 by the base compositions of amplification products of primer pairs 358 and 359. This is a useful result because E. coli 0157 is a sepsis pathogen and because E. coli K-12 is a low-level contaminant of the commercially obtained Taq polymerase used for the amplification reactions. A test of 9 blinded mixture samples was conducted as an experiment designed to simulate a potential clinical situation where bacteria introduced via skin or oral flora contamination could confound the detection of sepsis pathogens. The samples contained mixtures of sepsis-relevant bacteria at different concentrations, whose identities were not known prior to measurements. Tables 9A and 9B show the results of the observed base compositions of the amplification products produced by the primer pairs of Table 8 which were used to identify the bacteria in each sample. Without prior knowledge of the bacteria included in the 9 samples provided, it was found that samples 1-5 contained Proteus mirabilis, Staphylococcus aureus, and Streptococcus pneumoniae at variable concentration levels as indicated in Tables 9A and 9B. Sample 6 contained only Staphylococcus aureus. Sample 7 contained only Streptococcus pneumoniae. Sample 8 contained only Proteus mirabilis. Sample 9 was blank.

Quantitation of the three species of bacteria was carried out using calibration polynucleotides as described herein. The levels of each bacterium quantitated for each sample was found to be consistent with the levels expected.

[0308] This example indicates that the panel of primer pairs indicated in Table 8 is useful for identification of bacteria that cause sepsis.

[0309] In another experiment, two blinded samples were provided. The first sample, labeled “Germ A” contained Enterococcus faecalis and the second sample, labeled “Germ B” contained other Klebsiella pneumoniae. For “Germ A” the panel of primer pairs of Table 8 produced four bioagent identifying amplicons from bacterial DNA and primer pair numbers 347, 348, 349 and 449 whose base compositions indicated the identity of “Germ A” as Enterococcus faecalis. For “Germ B” the panel of primer pairs of Table 8 produced six bioagent identifying amplicons from bacterial DNA and primer pair numbers 347, 348, 349, 358, 359 and 354 whose base compositions indicated the identity of “Germ B” as Klebsiella pneumoniae.

[0310] One with ordinary skill in the art will recognize that one or more of the primer pairs of Table 8 could be replaced with one or more different primer pairs should the analysis require modification such that it would benefit from additional bioagent identifying amplicons that provide bacterial identification resolution for different species of bacteria and strains thereof

TABLE 9A
Observed Base Compositions of Blinded Samples of Amplification Products Produced with Primer Pair Nos. 346, 348, 349 and 449

| | | Organism | | | | |
|---|---|---|---|---|---|---|
| | Organism | Concentration | Primer Pair | Primer Pair | Primer Pair | Primer Pair |
| Sample | Component | (genome copies) | Number 346 | Number 348 | Number 349 | Number 449 |
| 1 | Proteus mirabilis | 470 | A29G32C25T13 | — | — | — |
| 1 | Staphylococcus aureus | >1000 | — | A30G29C30T29 | A26G3C25T20 | — |
| 1 | Streptococcus pneumoniae | >1000 | — | A26G32C28T30 | A28G31C22T20 | A22G20C19T14 |
| 2 | Staphylococcus aureus | >1000 | A27G30C21T21 | A30G29C30T29 | A26G30C25T20 | — |
| 2 | Streptococcus pneumoniae | >1000 | — | — | — | A22G20C19T14 |
| 2 | Proteus mirabilis | 390 | — | — | — | — |
| 3 | Proteus mirabilis | >10000 | A29G32C25T13 | A29G30C28T29 | A25G31C27T20 | — |
| 3 | Streptococcus pneumoniae | 675 | — | — | — | A22G20C19T14 |
| 3 | Staphylococcus aureus | 110 | — | — | — | — |
| 4 | Proteus mirabilis | 2130 | A29G32C25T13 | A29G30C28T29 | A25G31C27T20 | — |
| 4 | Streptococcus pneumoniae | >3000 | — | A26G32C28T30 | A28G31C22T20 | A22G20C19T14 |
| 4 | Staphylococcus aureus | 335 | — | — | — | — |
| 5 | Proteus mirabilis | >10000 | A29G32C25T13 | A29G30C28T29 | A25G31C27T20 | — |
| 5 | Streptococcus pneumoniae | 77 | — | — | — | A22G20C19T14 |
| 5 | Staphylococcus aureus | >1000 | | | | |
| 6 | Staphylococcus aureus | 266 | A27G30C21T21 | A30G29C30T29 | A26G30C25T20 | — |
| 6 | Streptococcus pneumoniae | 0 | | — | — | — |
| 6 | Proteus mirabilis | 0 | — | — | — | — |
| 7 | Streptococcus pneumoniae | 125 | — | A26G32C28T30 | A28G31C22T20 | A22G20C19T14 |
| 7 | Staphylococcus aureus | 0 | — | — | — | — |
| 7 | Proteus mirabilis | 0 | — | — | — | — |
| 8 | Proteus mirabilis | 240 | A29G32C25T13 | A29G30C28T29 | A25G31C27T20 | — |
| 8 | Streptococcus pneumoniae | 0 | — | — | — | — |
| 8 | Staphylococcus aureus | 0 | — | — | — | — |
| 9 | Proteus mirabilis | 0 | — | — | — | — |
| 9 | Streptococcus pneumoniae | 0 | — | — | — | — |
| 9 | Staphylococcus aureus | 0 | — | — | — | — |

TABLE 9B
Observed Base Compositions of Blinded Samples of Amplification Products Produced
with Primer Pair Nos. 358, 359, 354 and 2249

| | | Organism | | | | |
|---|---|---|---|---|---|---|
| | Organism | Concentration | Primer Pair | Primer Pair | Primer Pair | Primer Pair |
| Sample | Component | (genome copies) | Number 358 | Number 359 | Number 354 | Number 2249 |
| 1 | Proteus mirabilis | 470 | — | — | A29G29C35T29 | — |
| 1 | Staphylococcus aureus | >1000 | — | — | A30G27C30T35 | A43G28C19T35 |
| 1 | Streptococcus pneumoniae | >1000 | — | — | — | — |
| 2 | Staphylococcus aureus | >1000 | — | — | A30G27C30T35 | A43G28C19T35 |
| 2 | Streptococcus pneumoniae | >1000 | — | — | — | — |
| 2 | Proteus mirabilis | 390 | — | — | A29G29C35T29 | — |
| 3 | Proteus mirabilis | >10000 | — | — | A29G29C35T29 | — |
| 3 | Streptococcus pneumoniae | 675 | — | — | — | — |
| 3 | Staphylococcus aureus | 110 | — | — | — | A43G28C19T35 |
| 4 | Proteus mirabilis | 2130 | — | — | A29G29C35T29 | — |
| 4 | Streptococcus pneumoniae | >3000 | — | — | — | — |
| 4 | Staphylococcus aureus | 335 | — | — | — | A43G28C19T35 |
| 5 | Proteus mirabilis | >10000 | — | — | A29G29C35T29 | — |
| 5 | Streptococcus pneumoniae | 77 | — | — | — | — |
| 5 | Staphylococcus aureus | >1000 | — | — | — | A43G28C19T35 |
| 6 | Staphylococcus aureus | 266 | — | — | — | A43G28C19T35 |
| 6 | Streptococcus pneumoniae | 0 | — | — | — | — |
| 6 | Proteus mirabilis | 0 | — | — | — | — |
| 7 | Streptococcus pneumoniae | 125 | — | — | — | — |
| 7 | Staphylococcus aureus | 0 | — | — | — | — |
| 7 | Proteus mirabilis | 0 | — | — | — | — |
| 8 | Proteus mirabilis | 240 | — | — | A29G29C35T29 | — |
| 8 | Streptococcus pneumoniae | 0 | — | — | — | — |
| 8 | Staphylococcus aureus | 0 | — | — | — | — |
| 9 | Proteus mirabilis | 0 | — | — | — | — |
| 9 | Streptococcus pneumoniae | 0 | — | — | — | — |
| 9 | Staphylococcus aureus | 0 | — | — | — | — |

### Example 12

### Design and Validation of Primer Pairs Designed for Production of Amplification Products from DNA of Sepsis-Causing Bacteria

[0311] The following primer pairs of Table 10 were designed to provide an improved collection of bioagent identifying amplicons for the purpose of identifying sepsis-causing bacteria.

TABLE 10
Primer Pairs for Producing Bioagent Identifying Amplicons
of Sepsis-Causing Bacteria

| Primer | | | Forward | | | Reverse |
|---|---|---|---|---|---|---|
| Pair | Forward | Forward | SEQ ID | Reverse | Reverse | SEQ ID |
| Number | Primer Name | Sequence | NO: | Primer Name | Sequence | NO: |
| 3346 | RPOB_{—} | TGAACCACT | 616 | RPOB_{—} | TCACCGAAACGC | 627 |
| | NC000913_{—} | TGGTTGACGA | | NC000913_{—} | TGACCACCGAA | |
| | 3704_3731_F | CAAGATGCA | | 3793_3815_R | | |
| 3347 | RPOB_{—} | TGAACCACTT | 616 | RPOB_{—} | TCCATCTCACCG | 632 |
| | NC000913_{—} | GGTTGACGA | | NC000913_{—} | AAACGCTGA | |
| | 3704_3731_F | CAAGATGCA | | 3796_3821_R | CCACC | |
| 3348 | RPOB_{—} | TGTTGATGA | 623 | RPOB_{—} | TCCATCTCACC | 632 |
| | NC000913_{—} | CAAGATGCA | | NC000913_{—} | GAAACGCTGA | |
| | 3714_3740_F | CGCGCGTTC | | 3796_3821_R | CCACC | |
| 3349 | RPOB_{—} | TGACAAGA | 619 | RPOB_{—} | CTCACCGAAACGCT | 636 |
| | NC000913_{—} | TGCACGCG | | NC000913_{—} | ACCACC | |
| | 3720_3740_F | CGTTC | | 3796_3817_R | | |
| 3350 | RPLB_EC_{—} | TCCACACGG | 614 | RPLB_{—} | TCCAAGCGCAG | 630 |
| | 690_710_F | TGGTGGT | | NC000913_{—} | GTTTACCCC | |
| | | GAAGG | | 739_762_R | ATGG | |
| 3351 | RPLB_EC_{—} | TCCACACGG | 614 | RPLB_{—} | TCCAAGCGCAG | 628 |
| | 690_710_F | TGGTGGT | | NC000913_{—} | GTTTACCCCA | |
| | | GAAGG | | 742_762_R | | |
| 3352 | RPLB_{—} | TGAACCCTA | 618 | RPLB_{—} | TCCAAGCGCAGG | 630 |
| | NC000913_{—} | ATGATCAC | | NC000913_{—} | TTTACCCCATGG | |
| | 674_698_F | CCACACGG | | 739_762_R | | |
| 3353 | RPLB_{—} | TGAACCCTAA | 617 | RPLB_{—} | TCCAAGCGCA | 629 |
| | NC000913_{—} | CGATCACC | | NC000913_{—} | GGTTTACCCCA | |
| | 674_698_2_F | CACACGG | | 742_762_R | | |
| 3354 | RPLB_EC_{—} | TCCACACGG | 614 | RPLB_{—} | TCCAAGCGCT | 631 |
| | 690_710_F | TGGTGGTG | | NC000913_{—} | GGTTTACCCCA | |
| | | AAGG | | 742_762_2_R | | |
| 3355 | RPLB_{—} | TCCAACTGTTC | 613 | RPLB_{—} | TCCAAGCGCAG | 630 |
| | NC000913_ [symbol] _{—} | GTGGTTCTGT | | NC000913_{—} | GTTTACCCC | |
| | 680_F | AATGAACCC | | 739_762_R | ATGG | |
| 3356 | RPOB_{—} | TCAGTTCGGT | 610 | RPOB_{—} | TACGTCGTCCG | 625 |
| | NC000913_{—} | GGCCAGCGC | | NC000913_{—} | ACTTGACCG | |
| | 3789_3812_F | TTCGG | | 3868_3894_R | TCAGCAT | |
| 3357 | RPOB_{—} | TCAGTTCGG | 610 | RPOB_{—} | TCCGACTTGAC | 633 |
| | NC000913_{—} | TGGCCAGC | | NC000913_{—} | CGTCAGCAT | |
| | 3789_3812_F | GCTTCGG | | 3862_3887_R | CTCCTG | |
| 3358 | RPOB_{—} | TCAGTTCGG | 611 | RPOB_{—} | TCGTCGGACTT | 635 |
| | NC000913_{—} | TGGTCAGCG | | NC000913_{—} | GATGGTCAGC | |
| | 3789_3812_2_F | CTTCGG | | 3862_3890_R | AGCTCCTG | |
| 3359 | RPOB_{—} | TCCACCGGTC | 615 | RPOB_{—} | CCGAAGCGCTG | 624 |
| | NC000913_{—} | CGTACTCC | | NC000913_{—} | GCCACCGA | |
| | 3739_3761_F | ATGAT | | 3794_3812_R | | |
| 3360 | GYRB_{—} | TCATACTCA | 612 | GYRB_{—} | TGCAGTCAAGC | 637 |
| | NC002737_{—} | TGAAGGTGG | | NC002737_{—} | CTTCACGAA | |
| | 852_879_F | AACGCATGAA | | 973_996_R | CATC | |
| 3361 | TUFB_{—} | TGATCACTG | 620 | TUFB_{—} | TGGATGTGTTC | 638 |
| | NC002758_{—} | GTGCTGCTC | | NC002758_{—} | ACGAGTTTGA | |
| | 275_298_F | AAATGG | | 337_362_R | GGCAT | |
| 3362 | VALS_{—} | TGGCGACCG | 621 | VALS_{—} | TACTGCTTCGG | 626 |
| | NC000913_{—} | TGGCGGCGT | | NC000913_{—} | GACGAACTG | |
| | 1098_1115_F | | | 1198_1226_R | GATGTCGCC | |
| 3363 | VALS_{—} | TGTGGCGGCG | 622 | VALS_{—} | TCGTACTGCTT | 634 |
| | NC000913_{—} | TGGTTATCG | | NC000913_{—} | CGGGACGA | |
| | 1105_1127_F | AACC | | 1207_1229_R | ACTG | |

[symbol]

indicates data missing or illegible when filed

[0312] Primer pair numbers 3346-3349, and 3356-3359 have forward and reverse primers that hybridize to the rpoB gene of sepsis-causing bacteria. The reference gene sequence used in design of these primer pairs is an extraction of nucleotide residues 4179268 to 4183296 from the genomic sequence of E. coli K12 (GenBank Accession No. NC 000913.2, gi number 49175990). All coordinates indicated in the primer names are with respect to this sequence extraction. For example, the forward primer of primer pair number 3346 is named RPOB_NC000913_{—}3704_{—}3731 F (SEQ ID NO: 616). This primer hybridizes to positions 3704 to 3731 of the extraction or positions 4182972 to 4182999 of the genomic sequence. Of this group of primer pairs, primer pair numbers 3346-3349 were designed to preferably hybridize to the rpoB gene of sepsis-causing gamma proteobacteria. Primer pairs 3356 and 3357 were designed to preferably hybridize to the rpoB gene of sepsis-causing beta proteobacteria, including members of the genus Neisseria, Primer pairs 3358 and 3359 were designed to preferably hybridize to the rpoB gene of members of the genera Corynebacterium and Mycobacterium. Primer pair numbers 3350-3355 have forward and reverse primers that hybridize to the rp1B gene of gram positive sepsis-causing bacteria. The forward primer of primer pair numbers 3350, 3351 and 3354 is RPLB_EC_{—}690_{—}710_F (SEQ ID NO: 614). This forward primer had been previously designed to hybridize to GenBank Accession No. NC_{—}000913.1, gi number 16127994. The reference gene sequence used in design of the remaining primers of primer pair numbers 3350-3355 is the reverse complement of an extraction of nucleotide residues 3448565 to 3449386 from the genomic sequence of E. coli K12 (GenBank Accession No. NC_{—}000913.2, gi number 49175990). All coordinates indicated in the primer names are with respect to the reverse complement of this sequence extraction. For example, the forward primer of primer pair number 3352 is named RPLB_NC000913_{—}674_{—}698_F (SEQ ID NO: 634). This primer hybridizes to positions 674-698 of the reverse complement of the extraction or positions 3449239 to 3449263 of the reverse complement of the genomic sequence. This primer pair design example demonstrates that it may be useful to prepare new combinations of primer pairs using previously existing forward or reverse primers.

[0313] Primer pair number 3360 has a forward primer and a reverse primer that both hybridize to the gyrB gene of sepsis-causing bacteria, preferably members of the genus Streptococcus. The reference gene sequence used in design of these primer pairs is an extraction of nucleotide residues 581680 to 583632 from the genomic sequence of Streptococcus pyogenes M1 GAS (GenBank Accession No. NC_{—}002737.1, gi number 15674250). All coordinates indicated in the primer names are with respect to this sequence extraction. For example, the forward primer of primer pair number 3360 is named GYRB_NC002737_{—}852_{—}879_F (SEQ ID NO: 612). This primer hybridizes to positions 852 to 879 of the extraction.

[0314] Primer pair number 3361 has a forward primer and a reverse primer that both hybridize to the tufB gene of sepsis-causing bacteria, preferably gram positive bacteria. The reference gene sequence used in design of these primer pairs is an extraction of nucleotide residues 615036 . . . 616220 from the genomic sequence of Staphylococcus aureus subsp. aureus Mu50 (GenBank Accession No. NC_{—}002758.2, gi number 57634611). All coordinates indicated in the primer names are with respect to this sequence extraction. For example, the forward primer of primer pair number 3361 is named TUFB_NC002758_{—}275_{—}298_F (SEQ ID NO: 612). This primer hybridizes to positions 275 to 298 of the extraction.

[0315] Primer pair numbers 3362 and 3363 have forward and reverse primers that hybridize to the valS gene of sepsis-causing bacteria, preferably including Klebsiella pneumoniae and strains thereof. The reference gene sequence used in design of these primer pairs is the reverse complement of an extraction of nucleotide residues 4479005 to 4481860 from the genomic sequence of E. coli K12 (GenBank Accession No. NC_{—}000913.2, gi number 49175990). All coordinates indicated in the primer names are with respect to the reverse complement of this sequence extraction. For example, the forward primer of primer pair number 3362 is named VALS_NC000913_{—}1098_{—}1115_F (SEQ ID NO: 621). This primer hybridizes to positions 1098 to 1115 of the reverse complement of the extraction.

[0316] In a validation experiment, samples containing known quantities of known sepsis-causing bacteria were prepared. Total DNA was extracted and purified in the samples and subjected to amplification by PCR according to Example 2 and using the primer pairs described in this example. The three sepsis-causing bacteria chosen for this experiment were Enterococcus faecalis, Klebsiella pneumoniae, and Staphylococcus aureus. Following amplification, samples of the amplified mixture were purified by the method described in Example 3 subjected to molecular mass and base composition analysis as described in Example 4.

[0317] Amplification products corresponding to bioagent identifying amplicons for Enterococcus faecalis were expected for primer pair numbers 3346-3355, 3360 and 3361. Amplification products were obtained and detected for all of these primer pairs.

[0318] Amplification products corresponding to bioagent identifying amplicons for Klebsiella pneumoniae were expected and detected for primer pair numbers 3346-3349, 3356, 3358, 3359, 3362 and 3363. Amplification products corresponding to bioagent identifying amplicons for Klebsiella pneumoniae were detected for primer pair numbers 3346-3349 and 3358. Amplification products corresponding to bioagent identifying amplicons for Staphylococcus aureus were expected and detected for primer pair numbers 3348, 3350-3355, 3360, and 3361. Amplification products corresponding to bioagent identifying amplicons for Klebsiella pneumoniae were detected for primer pair numbers 3350-3355 and 3361.

### Example 13

### Selection of Primer Pairs for Genotyping of Members of the Bacterial Genus Mycobacterium and for Identification of Drug-Resistant Strains of Mycobacterium tuberculosis

[0319] To combine the power of high-throughput mass spectrometric analysis of bioagent identifying amplicons with the sub-species characteristic resolving power provided by genotyping analysis and codon base composition analysis, a panel of twenty-four genotyping analysis primer pairs was selected. The primer pairs are designed to produce bioagent identifying amplicons within sixteen different housekeeping genes indicated by primer name codes in Table 11; rpoB, embB, fabG-inhA, katG, gyrA, rpsL, pncA, rv2109c, rv2348c, rv3815c, rv0041, rv00147, rv1814, rv0005gyrB, and rv0260c. The primer sequences are listed in Table 11.

[0320] In Mycobacterium tuberculosis, the acquisition of drug resistance is mostly associated with the emergence of discrete key mutations that can be unambiguously determined using the methods disclosed herein.

[0321] The evolution of the Mycobacterium tuberculosis genome is essentially clonal, thus allowing strain typing through the query of distinct genomic markers that are lineage-specific and only vertically inherited. Co-infections of mixed populations of genotypes of Mycobacterium tuberculosis can be revealed simultaneously in the mass spectra of amplification products produced using the primers of Table 11. The high G+C content and of the Mycobacterium tuberculosis genome itself greatly facilitates the development of short, efficient primers which are appropriate for multiplexing (inclusion of a plurality of primers in each amplification reaction mixture).

TABLE 11
Primer Pairs for Genotyping and Determination of Drug Resistance
of Strains of Mycobacterium tuberculosis

| | | | Forward | | | Reverse |
|---|---|---|---|---|---|---|
| Primer | | Forward | Primer | | Reverse | Primer |
| Pair | Forward | Primer | (SEQ ID | Reverse | Primer | (SEQ ID |
| No. | Primer Name | Sequence | NO:) | Primer Name | Sequence | NO:) |
| 3546 | RPOB_{—} | TGTGGCCGCG | 670 | RPOB_L27989-1- | TAGCCCGGC | 694 |
| | L27989-1-5084_{—} | ATCAAGGAG | | 5084_2458_2474_R | ACGCTCAC | |
| | 2333_2351_F | | | | | |
| 3547 | RPOB_{—} | TCAGCCAGC | 671 | RPOB_L27989-1- | TCCGACAG | 695 |
| | L27989-1-5084_{—} | TGAGCCAATT | | 5084_2388_2407_R | CGGGTTGTTCTG | |
| | 2362_2384_F | CATG | | | | |
| 3548 | RPOB_{—} | TCGCTGTCGGG | 672 | RPOB_L27989-1- | TCCGACAGT | 696 |
| | L27989-1-5084_{—} | GTTGACC | | 5084_2418_2434_R | CGGCGCTT | |
| | 2397_2414_F | | | | | |
| 3550 | EMBB_{—} | TGCTCTGGCAT | 673 | EMBB_AY727532-1- | TGAAGGGAT | 697 |
| | AY727532-1- | GTCATCGGC | | 344_209_228_R | CCTCCGGGCTG | |
| | 344_100_119_F | | | | | |
| 3551 | EMBB_{—} | TGACGGCTACA | 674 | EMBB_AY727532-1- | TGCGTGGTC | 698 |
| | AY727532-1- | TCCTGGGC | | 344_160_176_R | GGCGACTC | |
| | 344_134_152_F | | | | | |
| 3552 | FABG-INHA- | TGCTCGTGGAC | 675 | FABG-INHA- | TCAGTGGCTGT | 699 |
| | PROMOTER_{—} | ATACCGA | | PROMOTER_{—} | GGCAGTCAC | |
| | U66801-1- | TTTCG | | U66801-1- | GGCAGTCAC | |
| | 993_169_191_F | | | 993_224_243_R | | |
| 3553 | KATG_U06268-1- | TCGGTAAGGAC | 676 | KATG_U06268-1- | TGTCCATACG | 700 |
| | 2324_991_1010_F | GCGATCACC | | 2324_1014_1034_R | ACCTCGATGCC | |
| 3554 | KATG_U06268-1- | TGCCAGCCTTA | 677 | KATG_U06268-1- | TGTGAGACAGTC | 701 |
| | 2324_1433_1454_F | AGAGCCAGATC | | 2324_1458_1480_R | AATCCCGATGC | |
| 3555 | GYRA_AF400983-1- | TCACCCGCAC | 678 | GYRA_AF400983-1- | TGGGCCA | 702 |
| | 385_69_84_F | GGCGAC | | 385_103_119_R | TGCGCACCAG | |
| 3556 | GYRA_AF400983-1- | TCGACGCGTCG | 679 | GYRA_AF400983-1- | TGGGCCATG | 702 |
| | 385_80_99_F | ATCTACGAC | | 385_103_119_R | CGCACCAG | |
| 3557 | RPSL_AY156733-1- | TGGCTCTGAAG | 680 | RPSL_AY156733-1- | TGCCGTGACCT | 703 |
| | 375_65_82_F | GGCAGCC | | 375_177_195_R | CGACCTGA | |
| 3558 | PNCA_AL123456.2_{—} | TCTGTGGCTGC | 681 | PNCA_AL123456.2_{—} | TCGGCGCCA | 704 |
| | gi41353971-1- | CGCGTC | | gi41353971-1- | CCGGTTAC | |
| | 4411532_2289165_{—} | | | 4411532_2289303_{—} | | |
| | 2289181_F (RC) | | | 2289287_R (RC) | | |
| 3559 | PNCA_AL123456.2_{—} | TCATCACGTCG | 682 | PNCA_AL123456.2_{—} | TACGTGTCCAG | 705 |
| | gi41353971-1- | TGGCAACCA | | gi41353971-1- | ACTGGGATGGA | |
| | 4411532_2288970_{—} | | | 4411532_2289119_{—} | | |
| | 2288989_F (RC) | | | 2289098_R (RC) | | |
| 3560 | PNCA_AL123456.2_{—} | TGTGCCTACAC | 683 | PNCA_AL123456.2_{—} | TCGTCTGGCGC | 706 |
| | gi41353971-1- | CGGAGCG | | gi41353971-1- | ACACAATGAT | |
| | 4411532_2288815_{—} | | | 4411532_2288953_{—} | | |
| | 2288832_F (RC) | | | 2288933_R (RC) | | |
| 3561 | PNCA_AL123456.2_{—} | TCCGATCATTG | 684 | PNCA_AL123456.2_{—} | TGGTGCGCATC | 707 |
| | gi41353971-1- | TGTGCGCCA | | gi41353971-1- | TCCTCCAG | |
| | 4411532_2288710_{—} | | | 4411532_2288839_{—} | | |
| | 2288729_F (RC) | | | 2288821_R (RC) | | |
| 3581 | RV2109C_{—} | TCGACCCGTC | 685 | RV2109C_AL123456.2_{—} | TGCCGAGGT | 708 |
| | AL123456.2_{—} | GTAGGTAATA | | gi41353971-1- | GGCGCATT | |
| | gi41353971-1- | CGATAC | | 4411532_2369342_{—} | | |
| | 4411532_2369291_{—} | | | 2369358_R | | |
| | 2369316_F | | | | | |
| 3582 | RV2348C_{—} | TGCCTGTTTGA | 686 | RV2348C_AL123456.2_{—} | TCGGGCTCAACG | 709 |
| | AL123456.2_{—} | AACTGCCCA | | gi41353971-1- | ACACTTCCT | |
| | gi41353971-1- | CATAC | | 4411532₋2627954_{—} | | |
| | 4411532_2627916_{—} | | | 2627974_R | | |
| | 2627940_F | | | | | |
| 3583 | RV3815C_{—} | TGCCTTGGTCG | 687 | RV3815C_AL123456.2_{—} | TCCACCGGAA | 710 |
| | NC000962-1- | GGCACATTC | | gi41353971-1- | CCCGGATCA | |
| | 4411532_4280680_{—} | | | 4411532₋4280716_{—} | | |
| | 4280699_F | | | 4280734_R | | |
| 3584 | RV0041_AL123456.2_{—} | TCTGCCCGCCG | 688 | RV0041_AL123456.2_{—} | TGGTCCGGGT | 711 |
| | gi41353971-1- | AGCAATAC | | gi41353971-1- | ACGCGGA | |
| | 4411532_43921_{—} | | | 4411532_43960_{—} | | |
| | 43939_F | | | 43976_R | | |
| 3586 | RV0147_AL123456.2_{—} | TCCGTAAGTC | 689 | RV0147_AL123456.2_{—} | TGGCGGGTAGA | 712 |
| | gi41353971-1- | GGTGTTGA | | gi41353971-1- | TAAAGCTGGACA | |
| | 4411532_174655_{—} | CCAAAC | | 411532_174694_{—} | | |
| | 174678_F | | | 174716_R | | |
| 3587 | RV1814_AL123456.2_{—} | TCGGGTCCACC | 690 | RV1814_AL123456.2_{—} | TGGATGCCGCC | 713 |
| | gi41353971-1- | ACGGAATG | | gi41353971-1- | ATAGTTCTTGTC | |
| | 4411532_2057117_{—} | | | 4411532_2057151_{—} | | |
| | 2057135_F | | | 2057173_R | | |
| 3599 | RV0083_AL123456.2_{—} | TGCCGACGCGA | 691 | RV0083_AL123456.2_{—} | TAACAGCTCGG | 714 |
| | gi41353971-1- | TCGAACAG | | gi41353971-1- | CCATGGCG | |
| | 4411532_92169_{—} | | | 4411532_{—} | | |
| | 92187_F | | | 92220_92238_R | | |
| 3600 | RV0005GYRB_{—} | TGACCAA | 692 | RV0005GYRB_{—} | TGAGGACACAG | 715 |
| | AL123456.2_{—} | GACC | | AL123456.2_{—} | CC | |
| | gi41353971-1- | AAGTTGGGCA | | gi41353971-1- | TTGTTCACA | |
| | 4411532_6348_{—} | | | 4411532_{—} | | |
| | 6368_F | | | 6457_6478_R | | |
| 3601 | RV0260C_AL123456.2_{—} | TGCCCAGAGC | 693 | RV0260C_AL123456.2_{—} | TACACCCACGCC | 716 |
| | gi41353971-1- | CGTTCGT | | gi41353971-1- | GTGGA | |
| | 4411532_311588_{—} | | | 4411532_311623_{—} | | |
| | 311604_F | | | 311639_2_R | | |

[0322] The panel of 24 primer pairs is designed to be multiplexed into 8 amplification reactions. Thirteen primer pairs were designed with the objective of identifying mutations associated with resistance to drugs including rifampin (primer pair numbers 3546, 3547 and 3548), ethambutol (primer pair numbers 3550 and 3551), isoniazid (primer pair numbers 3353 and 3354), fluoroquinolone (primer pair number 3556), streptomycin (primer pair number 3557) and pyrazinamide (primer pair numbers 3558, 3558, 3560 and 3561). Four of these thirteen primer pairs were specifically designed to provide bioagent identifying amplicons for base composition analysis of single codons (primer pair numbers 3547 (rpoB codon D526), 3548 (rpoB codon H516), 3551 (embB codon M306), and 3553 (katG codon S315)). In any of these bioagent identifying amplicons used for base composition analysis, detection of a mutation identifies a drug-resistant strain of Mycobacterium tuberculosis. The remaining nine primer pairs define larger bioagent identifying amplicons that contain secondary drug resistance-conferring sites which are more rare than the four codons discussed above, but certain of these nine primer pairs define bioagent identifying amplicons that also contain some of these four codons (for example, primer pair 3546 contains two rpoB codons; D526 and H516).

[0323] Shown in Table 12 are classifications of members of the bacterial genus Mycobacterium according to principal genetic group (PGG, determined using primer pair numbers X and X), genotype of Mycobacterium tuberculosis, or species of selected other members of the genus Mycobacterium (determined using primer pair numbers X, Y, Z), and drug resistance to rifampin, ethambutol, isoniazid, fluoroquinolone, streptomycin, and pyrazinamide. The primer pairs used to define the bioagent identifying amplicons for each PPG group, genotype or drug resistant strain are shown in the column headings. In the drug resistance columns, codon mutations are indicated by the amino acid single letter code and codon position convention which is well known to those with ordinary skill in the art. For example, when nucleic acid of Mycobacterium tuberculosis strain 13599 is amplified using primer pair number 3555, and the molecular mass or base composition is determined, mutation of codon 90 from alanine (A) to valine (V) is indicated and the conclusion is drawn that strain 13599 is resistant to the drug fluoroquinolone.

[0324] Primer pair number 3600 is a speciation primer pair which is useful for distinguishing members of Mycobacterium tuberculosis PPG1 (including genotypes I, II and HA) from other species of the genus Mycobacterium (such as for example, Mycobacterium africanum, Mycobacterium bovis, Mycobacterium microti, and Mycobacterium canettii).

TABLE 12
Classification and Drug Resistance Profiles of Strains of Members of the Genus Mycobacterium and Genotypes
of Mycobacterium tuberculosis

| | Principal | Genotype | | | | | | | |
|---|---|---|---|---|---|---|---|---|---|
| | Genetic | Primer Pair | Drug | | | | | | Drug |
| | Group | Numbers: | Resistance to | Drug | Drug | | Drug | Drug | Resistance to |
| | (PGG) | 3581, 3582, | Rifampin | Resistance to | Resistance to | | Resistance to | Resistance to | Pyrazinamide |
| | Primer | 3583, 3584, | Primer Pair | Ethambutol | Isoniazid | | Fluoroquinolone | Streptomycin | Primer Pair |
| | Pair | 3586, 3587, | Numbers: | Primer Pair | Primer Pair | | Primer Pair | Primer Pair | Numbers: |
| | Numbers: | 3599, 3600, | 3546, | Numbers: | Numbers: | | Number: | Number: | 3558, 3559, |
| Strain | 3554, 3556 | 3601 | 3547, 3548 | 3550, 3551 | 3553 | 3552 | 3555 | 3557 | 3560, 3561 |
| 19422 | PGG-1 | M africanum | wild type | wt | wt | wt | wt | wt | wt |
| | | or | | | | | | | |
| | | M. microti | | | | | | | |
| 10130 | PGG-1 | M. bovis | wt | wt | wt | wt | wt | wt | [part2] C > G |
| 35737 (BCG) | PGG-1 | M. bovis | wt | wt | wt | wt | wt | wt | wt |
| M. Canettii | PGG-1 | M. canettii | wt | wt | wt | wt | wt | wt | [part2] C > G |
| 14157, 15042 | PGG-1 | I | wt | wt | wt | wt | wt | wt | wt |
| 16116 | PGG-1 | IIA | wt | wt | wt | wt | wt | wt | wt |
| 15021 | PGG-1 | IIA | wt | wt | wt | wt | wt | wt | [part2] C > T |
| 5116 | PGG-1 | IIA | wt | wt | S315T | wt | wt | wt | wt |
| 12360, 13876, | PGG-1 | II | wt | wt | wt | wt | wt | wt | wt |
| 14149 | | | | | | | | | |
| 13599 | PGG-1 | II | wt | wt | wt | C-15T | A90V | wt | [part2] A > G |
| 13598 | PGG-1 | II | H528Y | M306V | S315 (N/T) | wt | wt | K43R | wt |
| 10545 | PGG-1 | II | wt | M306I | S315T | wt | wt | wt | wt |
| 13632 | PGG-1 | II | transition | M306I | S315T | wt | wt | wt | [part2] C > T, |
| | | | | | | | | | [part3] G > C |
| 14207 | PGG-1 | III | wt | wt | wt | wt | wt | wt | wt |
| 13866, 13874, | PGG-2 | III or IV | wt | wt | wt | wt | wt | wt | wt |
| 14038 | | | | | | | | | |
| 12578, 12590 | PGG-2 | III or IV | wt | wt | S315T | wt | wt | wt | [part3] G > C |
| 14404 | PGG-2 | IV | wt | wt | wt | wt | wt | wt | wt |
| 14831 | PGG-2 | IV | wt | wt | S315T | T-8C | wt | wt | wt |
| 5170, 13672, | PGG-2 | V | wt | wt | wt | wt | wt | wt | wt |
| 13699, 14424 | | | | | | | | | |
| 13679, 14399 | PGG-2 | VI | wt | wt | wt | wt | wt | wt | wt |
| 13592 | PGG-2 | VI | wt | wt | S315T | wt | wt | wt | wt |
| 13594, 13658, | PGG-3 | VII | wt | wt | wt | wt | T95S | wt | wt |
| 13869 | | | | | | | | | |
| 13821 | PGG-3 | VIII | wt | wt | wt | wt | T95S | wt | wt |
| 35837 (H37Rv7) | PGG-3 | VIII | wt | M306V | wt | wt | T95S | wt | wt |

### Example 14

### Validation of the Panel of 24 Primer Pairs

[0325] Each primer pair was individually validated using the reference Mycobacterium tuberculosis strain H37Rv. Dilution To Extinction (DTE) experiments yielded the expected base composition down to 16 genomic copies per well. A multiplexing scheme was then determined in order to spread into different wells the primer pairs targeting the same gene, to spread within a single well the expected amplicon masses, and to avoid cross-formation of primer duplexes. The multiplexing scheme is shown in Table 13 where multiplexed amplification reactions are indicated in headings numbered A through H and the primer pairs utilized for each reaction are shown below.

TABLE 13
Multiplexing Scheme for Panel of 24 Primer Pairs

| Reaction A | Reaction B | Reaction C | Reaction D | Reaction E | Reaction F | Reaction G | Reaction H |
|---|---|---|---|---|---|---|---|
| 3547 | 3548 | 3601 | 3551 | 3553 | 3554 | 3555 | 3556 |
| 3581 | 3584 | 3599 | 3582 | 3583 | 3587 | 3552 | 3586 |
| 3550 | 3600 | 3559 | 3560 | 3546 | 3558 | 3561 | 3557 |

[0326] An example of an experimentally determined table of base compositions is shown in Table 14. Base compositions of amplification products obtained from nucleic acid isolated from Mycobacterium tuberculosis strain 5170 using the primer pair multiplex reactions indicated in Table 13 are shown. Molecular masses of the amplification products were measured by electrospray time of flight mass spectrometry in order to calculate the base compositions. It should be noted that the lengths of the amplification products within each reaction mixture vary greatly in length in order to avoid overlap of molecular masses during the measurements. For example, reaction A has three amplification products which have lengths of 46 (A13 T11 C15 G07), 68 (A14 T18 C21 G15) and 129 (A21 T37 C44 G27).

TABLE 14
Base Compositions Obtained in the Multiplex Amplification Reactions
of Nucleic Acid of Mycobacterium tuberculosis Strain 5170

| | | Base Composition |
|---|---|---|
| Reaction | Primer Pair No. | (A G C T) |
| A | 3547 | 13 11 15 07 |
| A | 3581 | 14 18 21 15 |
| A | 3550 | 21 37 44 27 |
| B | 3548 | 06 13 12 07 |
| B | 3584 | 13 13 24 06 |
| B | 3600 | 37 34 35 25 |
| C | 3601 | 07 20 15 10 |
| C | 3599 | 10 26 22 12 |
| C | 3559 | 26 34 53 28 |
| D | 3551 | 08 13 16 06 |
| D | 3582 | 13 15 17 14 |
| D | 3560 | 28 48 37 26 |
| E | 3553 | 11 15 11 07 |
| E | 3583 | 06 19 16 14 |
| E | 3546 | — |
| F | 3554 | 11 13 14 10 |
| F | 3587 | 15 16 16 10 |
| F | 3558 | — |
| G | 3555 | 09 14 21 07 |
| G | 3552 | 13 26 22 14 |
| G | 3561 | 22 48 39 21 |
| H | 3556 | 07 11 15 07 |
| H | 3586 | 15 11 23 13 |
| H | 3557 | 26 44 39 22 |

[0327] Dilution to extinction experiments were then carried out with the chosen triplets of primer pairs in multiplex conditions. Base compositions expected on the basis of the known sequence of the reference strain were observed down to 32 genomic copies per well on average. The assay was finally tested using a collection of 36 diverse strains from the Public Health Research Institute. As expected, the base compositions results were in accordance with the genotyping and drug-resistance profiles already determined for these reference strains.

### Example 15

### Primer Pairs that Define Bioagent Identifying Amplicons for Hepatitis C Viruses

[0328] For design of primers that define hepatitis c virus strain identifying amplicons, a series of hepatitis C virus genome sequences were obtained, aligned and scanned for regions where pairs of PCR primers would amplify products of about 27 to about 200 nucleotides in length and distinguish strains and quasispecies from each other by their molecular masses or base compositions.

[0329] Table 15 represents a collection of primers (sorted by primer pair number) designed to identify hepatitis C viruses using the methods described herein. The primer pair number is an in-house database index number. The forward or reverse primer name shown in Table 15 indicates the gene region of the viral genome to which the primer hybridizes relative to a reference sequence. In Table 15, for example, the forward primer name HCVUTR5_NC001433-1-9616_{—}9250_{—}9273_F indicates that the forward primer CF) hybridizes to residues 9250-9275 of the UTR (untranslated region) of a hepatitis C virus reference sequence represented by an extraction of nucleotides 1 to 9616 of GenBank Accession No. NC_{—}001433.1. One with ordinary skill will know how to obtain individual gene sequences or portions thereof from genomic sequences present in GenBank.

TABLE 15
Primer Pairs for Identification of Strains of Hepatitis C Viruses

| Primer | | | Forward | | | Reverse |
|---|---|---|---|---|---|---|
| Pair | Forward | Forward | SEQ ID | Reverse | Reverse | SEQ ID |
| No. | Primer Name | Sequence | NO: | Primer Name | Sequence | NO: |
| 3682 | HCVUTR5_{—} | TCAGCGGA | 655 | HCVUTR5_{—} | TACTCCTCC | 662 |
| | NC001433-1-9616_{—} | GGTGACAT | | NC001433-1-9616_{—} | TTTCGGTA | |
| | 9250_9273_F | GTATCACA | | 9313_9337_R | GCGGTAGA | |
| 3683 | HCVUTR5_{—} | TCGACCAAC | 656 | HCVUTR5_{—} | GACATGTAT | 663 |
| | NC001433-1-9616_{—} | CTTAAACG | | NC001433-1-9616_{—} | CACAACCT | |
| | 9177_9200_F | CACTCCA | | 9261_9285_R | GTCGCACA | |
| 3684 | HCVUTR5_{—} | TTAGCACC | 657 | HCVUTR5_{—} | CATGCTAAT | 664 |
| | NC001433-1-9616_{—} | TCGACGG | | NC001433-1-9616_{—} | GTCGTTCC | |
| | 3644_3662_F | CTGG | | 3735_3756_R | GGCGA | |
| 3685 | HCVUTR5_{—} | TGCTCGGA | 658 | HCVUTR5_{—} | CATGCTGAT | 665 |
| | NC001433-1-9616_{—} | CCTTTACT | | NC001433-1-9616_{—} | GTCATTCCG | |
| | 3708_3731_F | TGGTCACG | | 3735_3757_R | GTGCA | |
| 3686 | HCVUTR5_{—} | TGCTCGGA | 658 | HCVUTR5_{—} | TCGGGTGGTC | 666 |
| | NC001433-1-9616_{—} | CCTTTAC | | NC001433-1-9616_{—} | CACTGCTCA | |
| | 3708_3731_F | TTGGTCACG | | 3822_3840_R | | |
| 3687 | HCVUTR5_{—} | TGCCCGT | 659 | HCVUTR5_{—} | GCTGTGTACAC | 667 |
| | NC001433-1-9616_{—} | CTCCTAC | | NC001433-1-9616_{—} | CCGGCGA | |
| | 3796_3817_F | TTGAAGGG | | 3876_3893_R | | |
| 3688 | HCVUTR5_{—} | TTTGCGG | 660 | HCVUTR5_{—} | GCTGTGTACAC | 667 |
| | NC001433-1-9616_{—} | GCACCTT | | NC001433-1-9616_{—} | CCGGCGA | |
| | 3855_3872_F | CCGG | | 3876_3893_R | | |
| 3689 | HCVUTR5_{—} | TTTGCGGG | 660 | HCVUTR5_{—} | ATGCGGTATCC | 668 |
| | NC001433-1-9616_{—} | CACCTT | | NC001433-1-9616_{—} | GGTCCTCACA | |
| | 3855_3872_F | CCGG | | 3942_3962_2_R | | |
| 3691 | HCVUTR5_{—} | TGGCTCGG | 661 | HCVUTR5_{—} | TGCCCAACGGA | 669 |
| | NC001433-1- | TTGTACAG | | NC001433-1- | CTACTTCCTGA | |
| | 9616_1974_1996_2_F | GGATGAA | | 9616_2070_2091 | | |

### Example 16

### Primer Pairs that Define Bioagent Identifying Amplicons for Identification of Strains of Influenza Viruses

[0330] For design of primers that define bioagent identifying amplicons for identification of strains of influenza viruses, a series of influenza virus genome sequences were obtained, aligned and scanned for regions where pairs of PCR primers would amplify products of about 27 to about 200 nucleotides in length and distinguish influenza virus strains of from each other by their molecular masses or base compositions.

[0331] Table 16 represents a collection of primers (sorted by primer pair number) designed to identify hepatitis C viruses using the methods described herein. The primer pair number is an in-house database index number. The forward or reverse primer name shown in Table 16 indicates the gene region of the influenza virus genome to which the primer hybridizes relative to a reference sequence. In Table 16, for example, the forward primer name FLUBPB2_NC002205_{—}603_{—}629_F indicates that the forward primer (F) hybridizes to residues 603-629 of an influenza reference sequence represented by an extraction of nucleotides from GenBank Accession No. NC_{—}002205. One with ordinary skill will know how to obtain individual gene sequences or portions thereof from genomic sequences present in GenBank.

TABLE 16
Primer Pairs for Identification of Strains of Influenza Viruses

| Primer | | | Forward | | | Reverse |
|---|---|---|---|---|---|---|
| Pair | Forward | Forward | SEQ ID | Reverse | Reverse | SEQ ID |
| Number | Primer Name | Sequence | NO: | Primer Name | Sequence | NO: |
| 1261 | FLUBPB2_{—} | TCCCATTGTAC | 639 | FLUBPB2_{—} | TATGAACTCA | 647 |
| | NC002205_603_{—} | TGGCATACA | | NC002205_667_{—} | GCTGATGTTG | |
| | 629_F | TGCTTGA | | 693_R | CTCCTGC | |
| 1266 | FLUANUC_{—} | TACATCCAGAT | 640 | FLUANUC_{—} | TCGTCAAATG | 648 |
| | J02147_118_{—} | GTGCACTGAAC | | J02147_188_{—} | CAGAGAGCAC | |
| | 148_F | TCAAACTCA | | 218_R | CATTCTCTCTA | |
| 1275 | FLUBNUC_{—} | TCCAATCATC | 641 | FLUBNUC_{—} | TCCGATATCAG | 649 |
| | NC002208_{—} | AGACCAGCAA | | NC002208_{—} | CTTCACTGC | |
| | 90_116_F | CCCTTGC | | 164_189_R | TTGTGG | |
| 1279 | FLUAM1_{—} | TCTTGCCAGTT | 642 | FLUAM1_{—} | TGGGAGTCAG | 650 |
| | NC004524_369_{—} | GTATGGGCCT | | NC004524_451_{—} | CAATCTGC | |
| | 396_F | CATATAC | | 473_R | TCACA | |
| 1287 | FLUAPA_{—} | TGGGATTCCTTT | 643 | FLUAPA_{—} | TGGAGAAGTT | 651 |
| | NC004520_{—} | CGTCAGTCCGA | | NC004520_{—} | CGGTGGGAG | |
| | 562_584_F | | | 647_673_R | ACTTTGGT | |
| 2775 | FLUANS1_{—} | TCCAGGACAT | 644 | FLUANS1_{—} | TGCTTCCCCA | 652 |
| | NC004525_1_{—} | ACTGATGAGGAT | | NC004525_29_{—} | AGCGAATCT | |
| | 19_F | GTCAAAAATGCA | | 52_R | CTGTA | |
| 2777 | FLUANS2_{—} | TGTCAAAAATG | 645 | FLUANS2_{—} | TCATTACTGCT | 653 |
| | NC004525_47_{—} | CAATTGGGGT | | NC004525_121_{—} | TCTCCAAGCGA | |
| | 74_F | CCTCATC | | 151_R | ATCTCTGTA | |
| 2798 | FLUPB1_{—} | TGTCCTGGAAT | 646 | FLU_ALL_{—} | TCATCAGAGG | 654 |
| | J02151_1210_{—} | GATGATGGGCA | | PB1_J02151_{—} | ATTGGAGTCCA | |
| | 1235_F | TGTT | | 1313_1337_R | TCCC | |
| 1261 | FLUBPB2_{—} | TCCCATTGTACT | 639 | FLUBPB2_{—} | TATGAACTCAG | 647 |
| | NC002205_603_{—} | GGCATACATG | | NC002205_667_{—} | CTGATGTTGCT | |
| | 629_F | CTTGA | | 693_R | CCTGC | |

### Example 17

### Primer Pairs that Define Bioagent Identifying Amplicons for Identification of Strains of Staphylococcus aureus

[0332] For design of primers that define bioagent identifying amplicons for identification of strains of Staphylococcus aureus, a series of Staphylococcus aureus virus genome sequences were obtained, aligned and scanned for regions where pairs of PCR primers would amplify products of about 27 to about 200 nucleotides in length and distinguish Staphylococcus aureus strains of from each other by their molecular masses or base compositions.

[0333] Table 17 represents a collection of primers (sorted by primer pair number) designed to identify Staphylococcus aureus strains using the methods described herein. The primer pair number is an in-house database index number. The forward or reverse primer name shown in Table 17 indicates the gene region of the influenza virus genome to which the primer hybridizes relative to a reference sequence. In Table 17, for example, the forward primer name MECA_Y14051_{—}4507_{—}4530_F indicates that the forward primer (F) hybridizes to residues 4507-4530 of the mecA gene of Staphylococcus aureus sequence represented by GenBank Accession No. Y14051. One with ordinary skill will know how to obtain individual gene sequences or portions thereof from genomic sequences present in GenBank.

TABLE 17
Primer Pairs for Identification of Strains of Staphylococcus aureus

| Primer | | | Forward | | | Reverse |
|---|---|---|---|---|---|---|
| Pair | Forward | Forward | SEQ ID | Reverse | Reverse | SEQ ID |
| Number | Primer Name | Sequence | NO: | Primer Name | Sequence | NO: |
| 879 | MECA_Y14051_{—} | TCAGGTACTG | 717 | MECA_Y14051_{—} | TGGATAGACGT | 727 |
| | 4507_4530_F | CTATCCACCC | | 4555_4581_R | CATATGAAG | |
| | | TCAA | | | GTGTGCT | |
| 2056 | MECI-R_{—} | TTTACACATAT | 718 | MECI-R_{—} | TGTGATATGGAGGT | 728 |
| | NC003923-41798- | CGTGAGCAAT | | NC003923-41798- | TAGAAGGTGTTA | |
| | 41609_33_60_F | GAACTGA | | 41609_86_113_R | | |
| 2081 | ERMA_{—} | AGCTATCTTATCGT | 719 | ERMA_{—} | TGAGCATTTTTA | 729 |
| | NC002952-55890- | [symbol] AGAAGGGATTT | | NC002952-55890- | TATCCATCT | |
| | 56621_366_395_F | G [symbol] | | 56621_438_465_R | CCACCAT | |
| 2086 | ERMC_{—} | TCTGAACATGA | 720 | ERMC_{—} | TCCGTAGTTTTG | 730 |
| | NC005908-2004- | TAATATCTTTGA | | NC005908-2004- | CATAATTTATG | |
| | 2738_85_116_F | AATCGGCTC | | 2738 173 206R | GTCTATTTCAA | |
| 2095 | PVLUK_{—} | TGAGCTGCATC | 721 | PVLUK_{—} | TGGAAAACTCA | 731 |
| | NC003923-1529595- | AACTGTATT | | NC003923- | TGAAATTAAA | |
| | 1531285_688_713_F | GGATAG | | 1529595-1531285_{—} | GTGAAAGGA | |
| | | | | 775_804_R | | |
| 2256 | NUC_NC002758- | TACAAAGGTC | 722 | NUC_NC002758- | TAAATGCACTT | 732 |
| | 894288- | AACCAATGAC | | 894288-894974_{—} | GCTTCAGGG | |
| | 894974_316_345_F | ATTCAGACTA | | 396_421_R | CCATAT | |
| 2313 | MUPR_X75439_{—} | TAATTGGGCTC | 723 | MUPR_X75439_{—} | TAATCTGGCTGCGG | 733 |
| | 2486_2516_F | TTTCTCGCTTA | | 2548_2574_R | AGTGAAATCGT | |
| | | AACACCTTA | | | | |
| 3005 | TUFB_NC002758- | TGCCGTGTTG | 724 | TUFB_NC002758- | TGCTTCAGCGT | 734 |
| | 615038-616222_{—} | AACGTGGTC | | 615038-616222_{—} | AGTCTAATAAT | |
| | 688_710_F | AAAT | | 783_813_R | TTACGGAAC | |
| 3016 | MUPR_X75439_{—} | TAGATAATTG | 725 | MUPR_X75439_{—} | AATCTGGCTGCGGA | 735 |
| | 2482_2510_F | GGCTCTTTCTC | | 2551_2573_R | GTGAAAT | |
| | | GCTTAAAC | | | | |
| 3106 | TSST1_NC002758.2_{—} | TCGTCATCAG | 726 | TSST1_{—} | TCACTTTGATAT | 736 |
| | 519_546_F | CTAACTCAAA | | NC002758.2_{—} | GTGGATCCGT | |
| | | TACATGGA | | 593_620_R | CATTCA | |
| 2738 | GYRA_NC002953- | TAAGGTATGAC | 737 | GYRA_{—} | TCTTGAGCCATA | 740 |
| | 7005-9668_{—} | ACCGGATAAA | | NC002953-7005- | CGTACCATTGC | |
| | 166_195_F | TCATATAAA | | 9668_265_287_R | | |
| 2739 | GYRA_NC002953- | TAATGGGTAAA | 738 | GYRA_{—} | TATCCATTGAAC | 741 |
| | 7005-9668_221_{—} | TATCACCCTC | | NC002953-7005- | CAAAGTTACCT | |
| | 249_F | ATGGTGAC | | 9668_316_343_R | TGGCC | |
| 2740 | GYRA_NC002953- | TAATGGGTAAA | 738 | GYRA_{—} | TAGCCATACGTA | 742 |
| | 7005-9668_{—} | TATCACCCTC | | NC002953-7005- | CCATTGCTTCA | |
| | 221_249_F | ATGGTGAC | | 9668_253_283_R | TAAATAGA | |
| 2741 | GYRA_NC002953- | TCACCCTCATG | 739 | GYRA_{—} | TCTTGAGCCATA | 740 |
| | 7005-9668_{—} | GTGACTCATC | | NC002953-7005- | CGTACCATTGC | |
| | 234_261_F | TATTTAT | | 9668_265_287_R | | |

[symbol]

indicates data missing or illegible when filed

### Example 18

### Comparison of Targeted Whole Genome Amplification Method with an Unbiased Whole Genome Amplification Method

[0334] A set of algorithms was developed for the design of TWGA primer sets favoring amplification of target DNA from a DNA mixture as described in Example 2. As a test case, a TWGA primer set consisting of approximately 200 primers was designed for the preferential amplification of Bacillus anthracis genomic DNA from a mixture of background genomes. The primer set showed high representation of the Bacillus anthracis genome and under-representation in a panel of eukaryotic genomes selected from mammals, insects, plants, birds, and nematodes. The primer set was designed with consistent binding of the primers along the Bacillus anthracis genome, maintaining representation across the entire genome during amplification. To demonstrate the preferential amplification of target DNA from a DNA mixture, mixtures of Bacillus anthracis and human DNA were amplified using targeted whole genome amplification, and the resulting products were quantified by Quantitative Real-Time PCR-based detection of distinctive genomic sequences. As shown in FIG. 5A, 175-fold amplification of B. anthracis DNA was observed in the presence of a ten million-fold excess of human background DNA, with minimal amplification of the background DNA itself. A 3000-fold amplification of target DNA was observed when background was reduced slightly, to a million-fold excess relative to the target DNA levels, again with minimal amplification of background DNA (FIG. 5B). Results obtained from the targeted whole genome amplification reaction are contrasted with results of an unbiased whole genome amplification reaction in FIG. 6. Target genome was prepared in a million-fold excess of background DNA and amplified by targeted whole genome amplification or by unbiased whole genome amplification. In contrast to targeted whole genome amplification, unbiased whole genome amplification uses random priming which should result in similar amplification of both target DNA and background DNA. In FIG. 6A it can be seen that targeted whole genome amplification favored amplification of the target DNA. In contrast, whole genome amplification produced similar levels of amplification of both components of the DNA mixture (FIG. 6B).

[0335] In FIG. 7, it is evident that targeted whole genome amplification increases the sensitivity of detection of target DNA from a mixture, in comparison to unbiased whole genome amplification. Reactions were prepared with human DNA present at 0.1 micrograms per reaction and with Bacillus anthracis genomic DNA incremented from 50 to 400 femtograms. Preferential amplification with targeted whole genome amplification primers was compared to unbiased amplification using random unbiased whole genome amplification primers. As shown above, targeted whole genome amplification gave higher yields of Bacillus anthracis DNA and lower yields of human DNA than unbiased whole genome amplification (FIGS. 7A and 7B). Significantly, targeted whole genome amplification gave detectable Bacillus anthracis product with 50 femtograms of starting material, whereas unbiased whole genome amplification did not. Targeted whole genome amplification primer sets were developed for six additional target organisms and a cocktail of the primer sets were run in the targeted whole genome amplification reactions. Similar results were obtained when targeted whole genome amplification was formulated with this pool of primer sets or with the Bacillus anthracis-specific targeted whole genome amplification primer set, indicating that targeted whole genome amplification can be multiplexed (targeted whole genome amplification seven-set primers vs. TWGA single-set primers, FIG. 7).

### Example 19

### Targeted Whole Genome Amplification Algorithm

[0336] This example demonstrates a method for generating a primer set for targeted whole genome amplification (TWGA) using ranking of oligonucleotides by combined hit ratios. The primer set includes 100-600 oligonucleotides that are 7-12 bases in length, and preferentially bind to a specific target genome or a plurality of target genomes over background genomes. The primer set minimizes that largest gap between primer binding sites on the target sequence. The primers are optimally no more than about 300 bases from one another. The target genome ideally is between 1 to 3 megbases in size. The background genomes might bet the human nuclear genome and human mitochondrial DNA. The TWGA primers include fewer oligonucleotides than primer sets described in the prior art. The TWGA primers are also superior because they are selected by considering the background genomes, and therefore are far less likely to unintentionally amplify background genome sequences as compared to primer sets known in the art.

[0337] In the first step, the number of times each oligonucleotide occurs in the target sequence is counted. The National Institutes of Health BLAST search tool, which is well-known in the art, can be used. For example, the target sequence might be.

(SEQ ID NO: 743)
ATCAGCGGATCTGACTGACTGACTGGCATGTAGCGGATTGCATG . . .

[0338] If each primer is to be seven bases-long, the number of times the following oligonucleotides appear in the target genome would be counted, as shown below.

```
(SEQ ID NO: 743)
ATCAGCGGATCTGACTGACTGACTGGCATGTAGCGGATTGCAT
G . . .
ATCAGCG
  TCAGCGG
    CAGCGGA
      AGCGGAT
        GCGGATC
          CGGATCT
```

[0339] This process is repeated for each oligonucleotide length, ranging from about 7 to 12 bases. For example, when such an analysis was performed on Burkholderia mallei with an oligonucleotide size of ten, the following results were obtained (SEQ ID NOS 744-757, respectively, in order of appearance).

| # TOTAL LENGTH (SINGLE STRAND) = 5835527 | |
|---|---|
| # TOTAL POSSIBLE COMBOS OF 10 = 1046676 | |
| # EXPECTED COUNT (DBL STRAND) = | |
| 11.1303844451904 | |
| cgcgcgcgcg | 3558 |
| cgccgcgcgc | 3397 |
| gcgcgcggcg | 3397 |
| cgcgcgcggc | 3131 |
| gccgcgcgcg | 3131 |
| cgcgccgcgc | 3114 |
| gcgcggcgcg | 3114 |
| gcgcgcgqgc | 2848 |
| cgcgcggcgc | 2829 |
| gcgccgcgcg | 2829 |
| cgcgcgccgc | 9730 |
| gcggcgcgcg | 2730 |
| cgcgagcgcg | 2636 |
| cgcgctcgcg | 2636 |
| . . . | |

[0340] The first three lines above show the length of the target genome, the number of different possibilities, and the expectation value of any oligonucleotide 10 nucleotides in length (i.e., the number of times one would expect to see in a genome of this size if A, G, T, and C were equally probable).

[0341] In the next step, the number of times each target oligonucleotide from above appears in the background genomes, such as a human nuclear genome and human mitochondrial genome, is counted. The frequency is divided by the background genome length to yield a hit ratio. The results may be as follows.

| | | | | BACKGROUND_HITS |
|---|---|---|---|---|
| OLIGO_ID | | SEQ | HITS | HIT_RATIO |
| 7_1 | cggcggc | 28940 | 228709 | 45.1101649710534 |
| 7_2 | gccgccg | 28940 | 228709 | 45.1101644710534 |
| 7_3 | cgccgcc | 22625 | 266046 | 30.3173332629497 |
| 7_4 | ggcggcg | 22625 | 266046 | 30.3173332629497 |
| 7_5 | cgccggc | 22433 | 149577 | 53.4664908832218 |
| 7_6 | gccggcg | 22433 | 149577 | 53.4664908832218 |
| 7_7 | cgccgcg | 20838 | 129075 | 57.5536728125335 |
| 7_8 | cgcggcg | 20238 | 129075 | 57.5536728125335 |

[0342] The hit ratio can be expressed as (# target hits/length of target genome)/(# background hits/length of background genome(s))

[0343] In the next step, the number of times each oligonucleotide appears in the human mitochondrial genome is counted. The frequencies from the target genome, the human nuclear genome, and the mitochondrial genome are combined to yield a combined hit ration, which is expressed as (# target hits/length of target genome)/(((# mitochondrial genome hits/length of mitochondrial genome)+(# human genome hits/length of human genome)/2) Such an analysis might yield the following results:

| OLIGO_ID | | SEQ | HITS | BACKGKROUND_HITS HIT_RATIO | TM | MITO_HITS | COMBINED_SCORE |
|---|---|---|---|---|---|---|---|
| 7_1 | cggcggc | 28940 | 228709 | 45.1101649710534 | 27.6336368226051 | 2 | 0.0259799794654524 |
| 7_2 | gccgccg | 28940 | 228709 | 45.1101649710534 | 27.6336368226051 | 2 | 0.0259799794654524 |
| 7_3 | cgccgcc | 22625 | 266046 | 30.3173332629497 | 27.6336368226051 | 2 | 0.0174604481301306 |
| 7_4 | ggcggcg | 22625 | 266046 | 30.3173332629497 | 27.6336368226051 | 2 | 0.0174604481301306 |
| 7_5 | cgccggc | 22433 | 149577 | 53.4664908832218 | 27.6336368226051 | 1 | 0.015396289684678 |
| 7_6 | gccggcg | 22433 | 149577 | 53.4664908832218 | 27.6336368226051 | 1 | 0.015396289684678 |
| 7_7 | cgccgcg | 20838 | 129075 | 57.5536728125335 | 29.7018255017817 | 0 | 0.0165732406298056 |
| 7_8 | cgcggcg | 20838 | 219075 | 57.5536728125335 | 29.7018255017817 | 0 | 0.0165732406298056 |
| 7_9 | cggcgcc | 20559 | 167828 | 43.6713594140391 | 27.6336368226051 | 0 | 0.0125756691594142 |
| 7_10 | ggcgccg | 20559 | 167828 | 43.6713594140391 | 27.6336368226051 | 0 | 0.0125756691594142 |
| 7_11 | ccgccgc | 19018 | 269199 | 25.1854980956924 | 27.6336368226051 | 3 | 0.0217573596917618 |

[0344] As result of the analyses above, a hit ratio has been calculated between every oligonucleotide in the target sequence as compared to the human and mitochondrial background genomes, as well as the combination (arithmetic mean) of the human and mitochondrial genomes.

[0345] In the next step, the oligonucleotides are ranked in descending order according to their combined hit ratios. Consequently, the oligonucleotides that preferentially bind to the target genome over the background genome are located at the top of the list.

In the next step is to generate primer sets that include oligonucleotides that preferentially bind to the target genome over the background genomes. The oligonucleotides are chosen from the ranked list one at a time. The goal is to pick oligonucleotides that bind to different areas of the target genome. In order to insure that a primer set does not include oligonucleotides that have very high hit ratios, but have lower frequencies in the target genome, a moving threshold is used. A pseudo-code that can be used to achieve this goal is:
Set target hit threshold to 0.
While the number of oligos in the set is less than the pre-determined size,
Grab the next oligo from the ranked list
Does it break up the largest remaining gap in coverage?
If yes,
Add oligo to set

### If no,

[0346] Discard oligo and continue
Is the set full?
If yes,
Increase target hit threshold and start a new set

[0347] Continue

[0348] This algorithm produces a series of sets of oligonucleotides, each with a different minimum number of target primer hits. The selection of primer sets requires a trade-off between sets that have a higher combined hit ratio and those with a higher maximum gap between adjacent primer sites. This is because the oligonucleotides with a high hit ratio tend to be longer (e.g., 11- and 12-mers) and infrequently appear in the background genomes. These oligonucleotides also infrequently appear in the target genome, but favor the target genome. A primer set might balance this trade off.

[0349] In order to perform this balance, for example, based on a search of a Borrelia genome, the following parameters might be assessed.

| [symbol] | [symbol] | [symbol] | [symbol] | [symbol] | [symbol] | [symbol] | [symbol] |
|---|---|---|---|---|---|---|---|
| [symbol] | [symbol] | [symbol] | [symbol] | [symbol] | [symbol] | [symbol] | [symbol] |
| [symbol] | [symbol] | [symbol] | [symbol] | [symbol] | [symbol] | [symbol] | [symbol] |
| [symbol] | [symbol] | [symbol] | [symbol] | [symbol] | [symbol] | [symbol] | [symbol] |
| [symbol] | [symbol] | [symbol] | [symbol] | [symbol] | [symbol] | [symbol] | [symbol] |
| [symbol] | [symbol] | [symbol] | [symbol] | [symbol] | [symbol] | [symbol] | [symbol] |

[symbol]

indicates data missing or illegible when filed

[0350] The most important parameters are the average hit ratio and the maximum distance between primer sites. Ideally, a primer set has a high hit ratio and a small maximum distance between primer sites. These two parameters are at odds with each other, so a balance is struck between these two parameters. Ideally, the maximum distance between sites should be about 500 nucleotides, but if the hit ratio is poor where this threshold is reached, then a primer set with a higher maximum distance between sites might be selected.

### Example 20

### Detecting Borrelia

[0351] This example demonstrates that a primer set for targeted genome amplification (TGA) of selected parts of a genome can reliably detect Borrelia DNA, even when present only at trace amounts, and in the presence of overwhelming amounts of other background DNA, such as in a human blood sample. The method provides a quick, reliable, and accurate PCR test for Borrelia DNA.

[0352] The following three sets of TGA primers (designated groups BCT3511, 3514, and 3517) were generated for targeting Borrelia DNA according to the methods described herein. The following table discloses SEQ ID NOS 758-832, respectively, in order of appearance.

| Primer | |
|---|---|
| name | Sequence |
| 3517E-F1 | TCT GCT TCT CAA AAT GTA AG |
| 3517E-F2 | TAA CCA AAT GCA CAT GTT AT |
| 3517E-F3 | TTG CTG ATC AAG CTC A |
| 3517E-F4 | GCA ACT TAC AGA CGA AAT |
| 3517E-F5 | AGA CAG AGG TTC TAT ACA AA |
| 3517E-F6 | AGG TAA CGG CAC ATA TT |
| 3517E-F7 | TAA GAA TGA AGG AAT TGG C |
| 3517E-F8 | AAT TTA AAT GAA GTA GAA AAA GTC T |
| 3517E-F9 | GGC TAT TAA TTT TAT TCA GAC AA |
| 3517E- | TTG TCA CAA GCT TCT AGA |
| F10 | |
| 3517E- | TTT CTG GTA AGA TTA ATG CTC |
| F11 | |
| 3517E- | GAG CTT CTG ATG ATG C |
| F12 | |
| 3517-R1 | GCA ACA TTA GCT GCA TAA |
| 3517E-R2 | TCC CTC ACC AGA GA |
| 3517E-R3 | ACA CCC TCT TGA ACC |
| 3517E-R4 | TGA GAA GGT GCT GTA G |
| 3517E-R5 | TTG TAA CAT TAA CAG GAG AAT TA |
| 3517E-R6 | TTA GCA AGT GAT GTA TTA GC |
| 3517E-R7 | TGA TCA CTT ATC ATT CTA ATA GC |
| 3517E-R8 | CTA TTT TGG AAA GCA CCT |
| 3517E-R9 | GCA TAC TCA GTA CTA TTC TTT AT |
| 3517E- | TGA GCA TAA GAT GCT TTT AG |
| R10 | |
| 3517E- | TCT GTC ATT GTA GCA TCT |
| R11 | |
| 3517E- | TTA AAA TAC TAT TAG TTG TTG CTG |
| R12 | |
| 3517E- | ATT AGC CTG CGC AA |
| R13 | |
| 3514E-F1 | CCG AAA AAG ATG GGC |
| 3514E-F2 | AGG TTA AAA AGT CCG AAA C |
| 3514E-F3 | TCT CCC GAT CAA ATT AGA A |
| 3514E-F4 | AAA GAG ATA AAA GAT TTT GAA AGA A |
| 3514E-F5 | AAA GCT AGG TTT TTG GAG |
| 3514E-F6 | ACA GAA AAA GAA GAA GAA TTG A |
| 3514E-F7 | ATG ATG CTG GGA ATC AG |
| 3514E-F8 | GGG CTT GGA CTT GA |
| 3514E-F9 | GTC TTT TAA TGT GCT AAT GC |
| 3514E- | GCG TTC CTA CTA ATG TAT C |
| F10 | |
| 3514E- | GGC AGA GTT AAA ATA TAT GAA AAT |
| F11 | |
| 3514E- | CAC CCT TCA AGA ACT TTT A |
| F12 | |
| 3514E-R1 | ATA CCA AAT ATG AGC AAC TG |
| 3514E-R2 | AAG CCC AAT CCT AGA G |
| 3514E-R3 | TAG AAT TCA AAC TAG ATG CTG |
| 3514E-R4 | CGG TTC AAT TAC TAC ATA TTT TT |
| 3514E-R5 | GCC CGG TTC AAT TAC |
| 3514E-R6 | TCT TCA TTT AAA AGC TGC AT |
| 3514E-R7 | GCT CTC TAG CTT CTA TGT A |
| 3514E-R8 | AAG CAT TAA AAG ACA TAC CAT A |
| 3514E-R9 | GAA GAG TTT TAA TAG CCT CA |
| 3514E- | GAC GAA AGC TCA TCA AG |
| R10 | |
| 3514E- | CAG TTT TAT CAT CTT TAT CTA TCA TT |
| R11 | |
| 3514E- | AAA TTC TCA ATA ATT TCA AGA CG |
| R12 | |
| 3514E- | ATC CAC TCT GGC TTA TT |
| R13 | |
| 3511E-F1 | CGT GAA GCT GCA AG |
| 3511E-F2 | TGG AAA AGC AAT AAA AGC T |
| 3511E-F3 | TGT TGT ATA TGA ACA TTT ATT GG |
| 3511E-F4 | GCT TGG TAA TTC TGA GAT AA |
| 3511E-F5 | CCT CAA TTT GAA GGT CAA A |
| 3511E-F6 | ATT TTA AAG AGG GGC TTA C |
| 3511E-F7 | GCC ATG AAT GAA GCT TT |
| 3511E-F8 | CTC ATG TTA TGG GAT TTA GAA |
| 3511E-F9 | CTG ACA ACA TTC TTT CTT TTG |
| 3511E- | TGT TAA TGT GGG GCT TA |
| F10 | |
| 3511E- | GCT TTT CAA TCA GAA CCT |
| F11 | |
| 3511E- | GAG GGT GGG ATA AAA TCT |
| F12 | |
| 3511E-R1 | CCC ATT TTA GCA CTT CCT C |
| 3511E-R2 | GCA AAA TGG CCT GAA A |
| 3511E-R3 | GTT TTC TCA ACA TTA AGC ATT |
| 3511E-R4 | CAT TGG TGA TAA CCT TAT CTT |
| 3511E-R5 | TCC TGC ACC AAG AG |
| 3511E-R6 | CTT GTG ATA ACG AAG TTT TG |
| 3511E-R7 | CAT CAA CAT CGG CAT C |
| 3511E-R8 | AAG CTA AAA GCA AAG TTC TA |
| 3511E-R9 | ATA TCC ATT TTC AAT TAA ATC TCT C |
| 3511E- | TAA AGA GGA GGC ATG G |
| R10 | |
| 3511E- | AAA ATA ATA AAT ACG ATT GTC ATA CT |
| R11 | |
| 3511E- | TTG CGA TTT TTA GTT TCA ATA G |
| R12 | |
| 3511E- | CAA GCC CTT TAT ATC TCT G |
| R13 | |

Amplification was performed as follows.

Reaction vol 50
Borrelia TGA

| B buffer mix | stock | | | | |
|---|---|---|---|---|---|
| Reagent | conc | | final conc | # of reactions | 1 |
| 10X Buffer B | 10 | X | 1 x | 10X Buffer B | 5 |
| Sample | | | | Sample | 40.85 |
| dNTP | 25 | mM ea | 0.2 mM ea | dNTP | 0.4 |
| TGA primer 3517 | 200 | uM | 10 uM | TGA primer | 2.5 |
| | | | | 3517 | |
| BstE | 8 | U/uL | 0.2 U/uL | BstE | 1.25 |
| | | | | total volume | 50 |

[0353] The sample consisted of a simulant created by extracting 1 mL of human blood by methods known in the art, and spiking in around 200 genomes of B. burgdorferi B31.

[0354] The protocol was as follows:

[0355] All the components minus the BstE enzyme was mixed in a PCR tube. The tube was then put in a PCR machine for the following cycle.

[0356] 95° C. for 3 min

[0357] Cool down and hold at 40° C.

[0358] The BstE enzyme was then added and the sample cycled at:

[0359] 40° C. for 2 hours

[0360] 80° C. for 20 min

[0361] 4° C. hold.

[0362] 10 μL of sample were loaded into a TBS 5.0 plate for BCT3517, 3514, and 3511. It was observed that addition of 10 μL of the amplification reaction resulted in failed wells as determined by total mol count compared to the neat reactions. The results are shown in FIG. 10. An optimization experiment was performed to identify buffer and temperatures for TGA amplification. The same reactions as above were used, except for the buffer, and for the incubation temperatures (which ranged from 35° C. to 55° C.). The samples were run only for the PCR reaction for BCT3517. The results are shown in FIG. 11. The highest levels of Borrelia DNA were detected at incubation temperatures of around 47° C. using buffer B.

[0363] Incubation times were also tested to determine if shorter times would still provide an increase in Borrelia DNA. The following reaction conditions were used.

Reaction vol 200
Borrelia TGA

| | stock | | final | | | |
|---|---|---|---|---|---|---|
| Reagent | conc | | conc | | # of reactions | 1 |
| 10X | 10 | X | 1 | x | 10X Buffer B | 20 |
| Buffer B | | | | | | |
| Sample | | | | | Sample | 175.15 |
| dNTP | 25 | mM ea | 0.2 | mM ea | dNTP | 1.6 |
| TGA primer | 100 | uM | 1 | uM | TGA primer | 2 |
| mix | | | | | mix | |
| BstE | 8 | U/uL | 0.05 | U/uL | BstE | 1.25 |
| | | | | | total volume | 200 |

[0364] The results are shown in FIG. 12. It was found that even at short times, an increase in Borrelia DNA was observed.

[0365] A test of sensitivity was also performed to evaluate the limits of detecting using the TGA assay in conjunction with a TBS 5.0 Assay for detecting Borrelia DNA. Simulants were created by using 200 μL of human DNA extract and spiking in varying copy numbers of B. burgdorferi B31 genome and running 10 μL of the reaction on a TBS 5.0 plate.

[0366] The following reaction conditions were used.

Reaction vol 200
Borrelia TGA

| | stock | | final | | | |
|---|---|---|---|---|---|---|
| Reagent | conc | | conc | | # of reactions | 1 |
| 10X | 10 | X | 1 | x | 10X Buffer B | 20 |
| Buffer B | | | | | | |
| Sample | | | | | Sample | 175.15 |
| dNTP | 25 | mM ea | 0.2 | mM ea | dNTP | 1.6 |
| TGA primer | 100 | uM | 1 | uM | TGA primer | 2 |
| mix | | | | | mix | |
| BstE | 8 | U/uL | 0.05 | U/uL | BstE | 1.25 |
| | | | | | total volume | 200 |

[0367] The protocol was as follows:

[0368] All the components minus the BstE enzyme was mixed in a PCR tube. The tube was then put in a PCR machine for the following cycle.

[0369] 95° C. for 3 min

[0370] Cool down and hold at 47° C.

[0371] The BstE enzyme was then added, briefly mixed, centrifuged, and the sample cycled at:

[0372] 47° C. for 1 hours

[0373] 80° C. for 20 min

[0374] 4° C. hold.

[0375] The results are shown in FIG. 13. Borrelia DNA was detected down to as few as two genomes in a total of 200 μL of human DNA extract, or equivalent to two genomes in 1 mL of human blood.

### Example 21

### TGA Primers for Detecting Whole Genomes

[0376] The method for TGA primer selection described herein was used to select primer sets for detecting Bacillus anthracis (BA), Yersinia pestis (YP), Brucella, Burkholderia, E. coli, Franciscella tularensis, and Rickettsia. The primers are described for each in Tables 18-24 below. An asterisk (*) indicates a phosphorothioate linkage.

TABLE 18
TGA Primers for Detecting Bacillus anthracis (SEQ ID NOS
833-1023, respectively, per column from left to right)

| | | | | |
|---|---|---|---|---|
| cgacttaccg*a*c | agaagcgat*g*a | aatcgcaa*t*t | gcttttttta*t*t | caattaat*a*c |
| tgtcggtaag*t*c | cttcttcttt*c*g | caccaatt*g*t | cttttaattc*t*t | attgaaac*g*a |
| tatatcrgcg*a*t | ttacgaaa*g*a | tgaagcga*t*t | catcaattg*t*t | attattat*c*g |
| aatcgcygat*a*t | tccgaaag*a*a | ttcacgaa*t*a | cgatataat*t*t | gcaattgt*t*g |
| tatatcgact*t*a | gcttcttt*c*g | gaaacgat*t*g | aagaagtaaa*a*g | ttcgtaaa*t*t |
| tatcggcgat*t*t | tgttctttc*g*t | tcaattgct*t*c | cgcttttta*t*t | tgaaacga*a*t |
| taacgaaaga*a*g | ttctttcg*c*a | cacctttta*c*a | atccgt*t*a | gctacttt*a*t |
| aaatcgttga*t*a | cttctttc*g*c | gaagaagta*g*c | cttcttta*a*t | gtattaaaa*g*a |
| ttgtcggta*a*g | gatacgaa*a*g | tcttttttc*g*c | tcattac*g*a | tgcttcttc*t*a |
| atcarcgatt*t*t | ttattatc*g*g | twacgat*t*g | atgtaac*g*a | taactcttc*t*t |
| tagaagaag*c*g | tacgaatg*a*t | tagaagc*g*a | caatcgt*a*t | tttattaga*t*g |
| ttctttcgtt*a*a | agcgaaaga*a*g | tagaagaa*g*t | taaagcg*t*t | cgatttttc*a*a |
| gattaaagtt*t*c | aagaagcga*a*g | caattgga*a*t | ttcaata*c*g | attaaagat*g*g |
| taaagtgaaa*c*t | tcgttaca*a*t | ttgtaatt*g*g | ttaacgg*a*a | taatam*c*g |
| ctttcgcttc*t*t | tttcgtat*a*t | aaataacg*a*t | gaagaagt*a*a | taatcg*y*a |
| gaagaagcga*a*a | caccaatt*a*c | ctttcgct*t*t | cgttaat*t*g | cgtaat*a*t |
| ctgattaaag*t*t | ctttttcg*t*a | tcgcttta*t*t | tattgatg*a*a | cttcgt*a*a |
| tacgaaaga*a*g | tgaaaaag*c*g | tttcgtta*t*a | taacagaa*g*a | atgaag*c*g |
| ttaacgaaa*g*a | tgcgaaaga*a*a | tttwtcgt*a*a | tatgtaa*c*g | catacg*a*a |
| cttctttcg*g*a | attgaaaaag*c*a | cgataaag*a*a | cgattga*a*g | atacgg*a*a |
| tctttcgc*t*a | gcaattgaaa*a*a | attacgat*a*a | ttagaaga*t*g | ttccgt*a*a |
| gcgaaagaa*g*c | catataa*c*g | atttatcg*t*a | taattgct*t*c | atacga*t*g |
| aacgaaagaa*g*a | aatcgttt*c*a | cttcttca*c*g | aacaccaa*t*t | tactcg*t*t |
| accgataa*t*a | tawtacga*a*a | atattatc*g*t | tgtaaaag*g*t | cggtaa*a*t |
| tcttctaa*c*g | aacgaaag*a*t | taaatcttc*t*a | tccaattg*a*a | tcgtat*t*g |
| aatcgc*t*a | cgtata*a*c | acaacga*t*t | tctacaat*t*a | aagcg*g*a |
| tattcg*c*t | taatgaag*a*a | cgttatg*a*a | cttccata*a*t | gatta*c*g |
| taccgt*t*a | ttcttta*c*g | ttgcaatt*g*c | tcaattgc*a*a | cgata*a*c |
| attaac*g*c | aaaacaat*t*g | attgcttc*t*t | tcctgtta*c*a | cggat*a*t |
| tattag*c*g | taacgga*a*a | tacaattt*c*a | gcaattgt*a*t | atatg*c*g |
| atcata*c*g | ctttttya*t*c | aaaaggta*t*t | gatgaatt*a*g | gttcg*t*a |
| gcgtaa*t*a | attatatg*a*a | attacaaa*a*g | cttttgtaa*t*a | cgcaa*t*a |
| aaaagaat*t*a | attacgt*t*a | tctttata*t*g | aaatggtga*a*g | cgatg*t*a |
| ctatcg*t*a | tcttcaat*a*t | cttctgca*a*t | tgaaacaat*t*g | gttgc*g*a |
| ttctttta*t*a | acgaagc*a*a | tctactaa*t*t | taaagataa*t*g | tcgca*t*a |
| tccgct*a*a | caacttct*t*t | aaaacgtt*t*a | tctttatat*t*c | |
| cttttttc*a*t | aaaaggtg*a*a | gttaattg*a*a | tgcaa*c*g | |
| aacgaat*a*a | cggttta*a*t | attacttg*t*a | tccgt*a*t | |
| atataaaa*g*a | attgtcg*t*t | cttctata*t*a | ccgct*t*t | |

TABLE 19
TGA Primers for Detecting Yersinia pestis (SEQ ID NOS
1024-1211, respectively, per column from left to right)

| | | | | |
|---|---|---|---|---|
| aacgggctac*c*g | agcgatta*c*c | tttatccg*c*a | ttgatcg*c*c | ccgtatt*g*a |
| gtatcccggt*a*g | ggcgattg*c*c | atggcgct*g*g | tgccggt*a*a | cgatatc*c*c |
| cttacggccc*g*t | tatccagc*g*c | ctccggtg*g*c | cagcggt*a*a | cgctgat*c*g |
| cccgtttacg*g*g | gcaatacc*g*t | csaatac*c*g | aacccgc*c*a | gcccgat*g*g |
| tgttagggcg*c*g | tcaggcgy*t*g | ggcggtw*t*t | gcgatga*c*c | gtaacgc*c*a |
| ccctaacagg*c*g | gccggtat*t*g | caatacc*g*g | cccgcca*g*t | ggtaacg*g*c |
| gtacttcggc*g*c | tgcgggta*t*t | ggcgata*g*c | agtatga*c*g | gtttacc*g*c |
| cttataggcg*c*a | ttacagttcc*a*t | tttatcgc*c*a | gccctga*c*g | taatgc*g*g |
| tgcgccgaag*t*a | caggcgtt*g*g | ttgccgcc*t*t | cggtaaa*g*c | cgatac*c*c |
| gcgcctataa*g*g | tatctgcc*g*t | gatatcg*c*c | gccgcta*t*t | taccgg*g*c |
| ccggcatagc*c*g | ggcaacgg*t*a | taccgcc*a*g | ccaatgc*g*g | ggcgatg*a*t |
| ttgccagacc*g*c | tggcaatc*g*c | gcggtta*t*c | ctgacgg*c*g | atgccga*t*g |
| agtgattcgg*g*t | ttatccag*c*g | ataaccg*c*c | cattacc*c*g | gctggcg*c*a |
| tgcggtctgg*c*a | aataccgc*c*a | tcgcggg*c*a | taccggt*a*t | atcgcca*c*c |
| tgccggagga*t*a | atgaatac*c*g | cgatagc*g*g | rccggtt*a*t | gcggctg*a*a |
| gttccatcgg*g*t | aacaggcg*a*t | ggcagata*g*c | ccgataa*c*c | tcatcgg*c*a |
| ctctcgatcc*c*g | gccgccag*t*t | tcatcaac*g*t | cgtttag*c*g | gttggcg*g*c |
| tactgaaccc*c*c | atcgctat*t*g | atcgccat*c*a | atttttac*c*g | gcgctgt*t*g |
| gggtcagtta*t*a | atcgccga*t*g | ttgatgac*g*t | cgccagc*a*a | aatggcg*g*t |
| atcctcaccg*t*t | cggcagat*t*g | cgccaat*a*a | attggcg*t*t | cgcttta*t*c |
| gtcaataacc*t*c | tcgccacc*g*g | taccggc*a*a | gccgctg*a*t | cacggta*t*t |
| gtgaggatag*g*c | attcgcca*c*c | ataccgg*t*g | mactggc*g*c | ttggccg*c*a |
| gctatgccg*g*a | atccagcg*c*c | atcaccc*g*c | gccgctt*t*a | ttgcccg*c*c |
| tagctggggg*t*t | accgttgc*c*g | tttdgcc*g*c | tcggtat*t*g | gataaac*c*g |
| ggggtttgtc*a*g | rataccc*g*c | tattrcc*g*c | attaccg*g*t | tcaccga*t*a |
| gtcatcggg*g*t | atcatcac*g*c | gcgatag*c*g | tatcggc*a*t | aaccggt*a*a |
| aaacccccag*c*t | gatgcgtt*g*a | tcaatatt*g*g | aatctgs*c*g | tgcggat*a*t |
| agcatcagac*t*g | cggtgctg*a*c | gtaatac*c*g | ccaatrg*c*g | gaaccgg*t*g |
| acgctttac*t*c | aaagtgcc*c*g | cgtaatg*c*g | cggtaat*a*t | atttacc*c*g |
| tgaggttatt*g*a | catcaccg*g*c | gctaacc*g*c | gcggtaa*t*g | ctggcga*a*t |
| atgcttctgg*a*g | aaagctat*c*g | gcgggta*a*c | gataacc*g*t | accggca*t*c |
| ccgcaata*c*c | cggccaat*a*a | tggcgat*c*a | ctggcgc*g*g | ttaccgt*c*a |
| taaccgcc*a*g | agccagcg*c*a | cgccagc*g*c | agataac*c*g | ggccgtt*g*g |
| cactggc*g*t | cgccttg*a*t | tatcsgt*c*a | gtaccc*g*c | tggcgat*g*g |
| gcgttga*t*a | attggcg*g*g | tgcgcca*t*a | cgtacc*g*g | tggctgg*c*g |
| cataacg*c*a | cagtaac*g*c | tgaactgg*c*t | gcgtac*c*g | cgaacgt*t*t |
| aatgccc*g*c | ttataac*g*g | atggcg*g*c | gccaata*a*c | |
| ggtgacc*g*c | cggtatc*c*a | tagcgg*g*t | aaaatac*c*g | |

TABLE 20
TGA Primers for Detecting Brucella (SEQ ID NOS 1212-1405,
respectively, per column from left to right)

| | | | | |
|---|---|---|---|---|
| tagagcggtt*c*c | cggccttg*c*g | tcgcgccg*g*g | cttcggcg*a*t | gatcgacg*g*c |
| cggaaccgct*c*t | attgcccg*c*g | gcctttgc*c*g | cgacgatc*a*g | gatatcga*g*c |
| gcgcatcccg*a*a | atcatgcg*c*g | cgcgcgct*t*c | gcggcggc*a*a | tcggcgga*a*a |
| ttagagcggt*t*c | gccgcgcg*c*a | gcctgccg*g*a | gaaagcgg*c*g | ggcgcaga*t*g |
| aaagtgcgaa*g*c | tgcggcgc*g*c | cgcaatgg*c*g | tgccgccg*a*c | gatgccga*c*g |
| gaaccgctc*t*a | caaggcgc*t*t | ctggcgct*c*g | cgcgcgcc*g*g | gccgccat*s*a |
| ccggaaccgc*t*c | tcggcggc*a*t | cgaaaagc*c*g | gcttccgc*c*g | cggcatgg*t*g |
| cacttttcgg*g*a | tgccgatg*c*g | cgcggcag*g*c | cacgcgcg*g*c | cggtgcgc*g*c |
| cgtttcacac*t*t | gctttcgg*c*g | gccaatgc*g*g | agcttgcg*c*a | ccggttct*g*g |
| sgcgcttgc*c*g | tgcgcgcc*g*a | tccggcgc*a*t | gcggcatg*a*a | catgcccg*c*c |
| gcgccgatc*t*g | gatcaggc*g*c | cttcggcc*c*g | gcgatttc*c*g | cgccatcg*a*g |
| gcgcttgcc*g*a | gcgcttcg*g*c | gcgccatg*g*c | ccttggcg*g*c | cgacgatt*t*c |
| gcggcaagc*g*c | ggcgcgca*t*g | cgcaagct*t*g | tgcggcgc*t*g | cggcagaa*g*c |
| cgccggaaa*g*c | tcagcgcg*c*c | gaccggca*a*t | atgccgat*g*g | tgccatgg*c*g |
| cggcaaggc*g*c | tcgcccgc*a*t | cgcaatcg*c*c | ggcgcagg*c*t | tcttgccg*a*t |
| cgatattgc*c*g | cggcwtcg*g*c | gcgccagc*g*g | cgcgcggg*c*a | atggcgcg*g*a |
| gcttcgcac*t*t | ccttgccg*r*a | atcgagcg*c*g | gcgctggc*g*a | accggcc*c*g |
| tgaaacggtt*t*t | aggcgcgc*a*a | tcggcatg*g*c | gccgggcg*a*a | ccgatac*g*c |
| gcgcgcaag*g*c | ggcgcggc*t*t | gccgcatc*g*c | gcgcgctt*c*t | tgcgcga*c*c |
| gcgccagcg*c*a | gcgcgcca*g*c | gcggcaat*c*a | ggcgaagc*g*c | attttccg*g*c |
| gccgatctg*a*t | gatgcgcc*g*c | gatgcggt*c*g | atcggcgg*c*g | cgccatca*t*g |
| gccgatgcg*c*t | cgcttcgg*c*a | gcgtctgg*c*g | gaaaaggc*c*g | ctcgatca*t*c |
| gccggaaag*c*g | gcgcaagc*c*g | gcggtcgc*c*a | aaaagccg*c*c | aatgccgc*c*a |
| tcggcaag*c*g | cgcgccga*a*a | ccatgccg*c*c | gccgcgcc*g*a | tcgatac*g*g |
| cgcctgat*c*g | catcggca*c*g | cgccatgg*g*c | gcatcgcc*g*c | ggcgttg*c*g |
| tcggccttg*c*c | atctggcg*c*g | gctcgacc*a*g | tgccgaaa*g*c | cggcccg*a*t |
| ttgcccgcg*c*c | ctgatccg*c*g | cgccgatc*c*g | cggcgcgc*t*c | cgatttca*t*c |
| gcgcgcct*t*s | gccttgcc*g*c | gcctttcg*g*c | cggcaagc*t*c | cgccgctt*c*c |
| agcgccagc*g*c | gcatccgc*g*c | acgccgga*a*a | cggccagt*t*c | tgaaaacg*g*c |
| gcgctgat*c*g | ttgcggat*c*g | tgccgcgc*c*c | cttcggcc*t*t | ccggcggg*c*g |
| cggcaaggg*c*g | cagcgtat*c*g | cgatgcgg*c*a | tgcgcggc*g*g | acgatgc*g*g |
| gcgccttg*c*g | ccgaaggc*g*c | gcgaaacg*c*c | gcaagcgc*a*t | attgccg*a*c |
| cggcaggc*c*g | ttgcgcgc*c*a | gccggtgc*c*g | aaggccgc*c*g | ggccgca*a*c |
| cgcctgccg*c*a | cgcgaagg*c*g | catttccg*g*c | caatggcg*g*c | cgcccgcc*g*c |
| gcttgcgc*g*c | gcggcagg*c*g | ttggcggc*a*a | cggcggca*c*g | cgcatgg*t*c |
| cgccttgc*c*g | ggcttccg*c*c | gccggaac*t*g | cctgcgcc*a*g | gcgcgcac*g*c |
| gcgcgsca*t*c | cgatatcg*a*c | tgcgcgcc*c*g | ttccggca*t*t | gcgaggcg*g*c |
| cgccaatg*c*g | cgggcggc*a*a | ccgatgcc*g*g | atcatcgg*c*g | atctgcc*g*c |
| gccatgcg*c*g | ttcggcct*g*c | cgaaatgc*g*c | cttcatgc*c*g | |

TABLE 21
TGA Primers for Detecting Burkhoderia (SEQ ID NOS 1406-1590,
respectively, per column from left to right)

| | | | | |
|---|---|---|---|---|
| cgacgctcgc*g*c | cgacgagcgc*g*c | cgcgcacgcg*g*c | ccgcgccgcg*c*a | cgcgttcct*c*g |
| gcgcgtcgmg*c*g | gcagcgcgtc*g*a | cgcgcgcatc*g*a | cgcttcgacg*c*g | cttcgacga*g*c |
| gcgctcgwcg*c*g | atgccgccga*a*c | cgcgtcgaac*g*c | cgcgcagga*c*g | tcgtcggg*c*a |
| agcgtccgcg*g*t | tcgcggcggg*c*g | atcaagcgcg*g*g | acgccgatg*c*g | catgtcgc*g*c |
| gaacttcgcg*c*g | cgcgcacgtc*g*a | cgcgctcgtg*c*t | gcgccgacgc*c*g | cgacggcac*c*g |
| gcgmgcgcgt*c*g | cgcggcgctt*g*a | ctcgccgcgc*g*c | tgcgcgtga*c*g | cgaggccga*t*g |
| agcgcgtcgc*g*c | cgcgagccgc*g*c | ccgatgcgcg*c*g | cgccgcgccg*t*y | gaacgcgg*t*c |
| cgcggcgagc*g*c | cgacgcccgc*c*g | cgccgcccgc*g*a | attcggcg*c*g | cgcgcgcgcg*t*t |
| cgagcgtcgc*g*c | gcgcatcggc*g*c | gctcgagcgc*g*c | gcgtcttcag*c*a | ccggctcg*c*g |
| gacgcgctcg*c*g | cggcgagcgc*g*t | cgcggtcgcg*c*t | ggcgggcgcg*c*g | tcgtgctcg*a*g |
| gcgtcgagcg*c*g | ctcgcgcagc*g*c | acagcgcgcc*g*a | cgatgtcgtc*g*a | caccgcgccg*c*c |
| tcgkcgcgct*c*g | aaccgccgaa*c*c | cgccgcgttc*g*c | acgagcggca*g*c | tcgccgcccg*c*c |
| cgcgatcggc*g*s | gcgcgctgcg*c*g | gttcggcgcg*c*g | cgggcttgc*c*g | cgtcgtga*t*g |
| cggcgcgctc*g*y | cgmcgatgcg*c*g | cgtcgcgcgg*c*a | cgtcgacgac*g*t | cgcgcaga*a*g |
| cgcgccgcgc*g*a | gtcggcgcgc*c*g | cgcgccgacg*c*t | cgtcgaaca*g*c | cggcatga*c*g |
| agtgacgcgt*c*g | gcgacgcgcg*c*c | gcggcgagcc*g*c | gccgcccgt*c*a | ccgcgccgcc*g*t |
| cgcgctcgcc*g*m | gccgcgcgct*c*g | ttcggcgcgg*g*c | attcgagcg*c*g | cgagcgaat*c*g |
| tcgcgcgcga*g*c | gcgckcgccg*a*a | cgcgcgaacg*c*g | cgtcagcac*g*a | acctgctcg*g*c |
| cgagcgcgtc*g*a | tccttgaccg*g*c | gagcgcgatc*g*c | tcgcatcgg*c*g | agcgggcgc*g*c |
| cgcgagcgcg*c*c | gcgcgccgtt*c*g | ggcgatcgcc*g*c | cgccgacg*c*a | aaagccctga*g*c |
| gatcggcgcg*c*c | atcgtcgcgg*g*c | cgacgccgcg*c*t | gctcgagat*c*g | tccgcgac*g*c |
| cacgacgctc*g*c | cggcgtcgcg*c*t | gacgccgagc*g*c | ccgctacg*c*g | atcgcccg*g*c |
| aaccgcggac*g*c | atcggcgtcg*c*g | ccgcgcacgc*g*a | cgccgaaat*c*g | gcacgggc*g*t |
| gcggcgctcg*c*g | tcgcgagcgc*g*t | ttcggcggcg*c*g | acgccgagc*c*g | ggcgtgac*c*g |
| gcgatcrcgc*c*g | cgatcggcgc*g*a | atcgcggcgc*g*c | cggcaagcc*g*a | cgccgaag*t*g |
| cgcgccggcg*c*g | gcggccgtcg*c*g | gcgcgcatcg*g*c | tggccgcggc*g*g | tacggcgc*g*g |
| gcgcggcgat*c*g | cgcgccgagc*a*s | cgatcaccgc*g*c | cgagcttgt*c*g | actgcgcg*a*g |
| cgtcgattcg*g*c | tcgagcggcg*c*g | cttcggcgag*c*g | gaacgccgg*c*g | cggcatcgg*c*t |
| tccggcttcg*c*g | agactccggc*t*g | catccggcgc*g*c | cgcttcgac*g*a | cgtcctcga*c*g |
| cccgacaagc*c*g | tcgcggccga*g*c | cgacgatcgc*g*g | cggtgcgcg*t*g | cgtgctga*c*g |
| gcgcgccgac*g*c | tcgcgcgcga*c*g | cggcgaacgc*g*g | tcgacgtcg*t*g | ggcatgcc*g*c |
| cgcgcgytcg*g*c | cggccgcgcg*c*g | cgcgcgcaag*c*g | acgtcgcg*a*a | cgcgaact*t*c |
| gcgctcgcga*a*g | cgtcgcgatc*c*a | cgcgtgctcg*a*c | cggcggcggg*c*c | gcggtccg*c*g |
| gmgcgcgccg*c*g | tcggcatcgc*g*c | gcctgccgcg*c*g | cgtcgcgc*t*t | acatgaagaa*g*c |
| cgcttcgcgc*g*c | ggccgcgagc*g*c | cgctcgtcgg*c*c | gcgctcacg*c*t | tgcgcacg*g*c |
| gcgwcgcccg*c*g | cggcacgctc*g*c | gagcgcttcg*g*c | gcttcgcg*a*a | gcgccgccgt*c*g |
| agcgcgacga*g*c | cgatcgcggc*g*g | cgggcctcgc*g*c | aggcccgc*g*c | acgccgcg*a*t |

TABLE 22
TGA Primers for Detecting E. coli (SEQ ID NOS 1591-1780,
respectively, per column from left to right)

| | | | | |
|---|---|---|---|---|
| cggataaggc*g*t | acgcgccag*c*g | aactggcg*c*g | gcgtttac*g*c | cgccagcg*g*c |
| cctgatgcga*c*g | cgcgctgg*c*g | ctggcgctg*a*t | acgctggc*g*g | ccgctggc*g*a |
| agcgtcgcat*c*a | gctggcgc*g*t | gcgccagc*g*c | caggcgctg*g*a | cgcgctgg*a*t |
| cgccttaccc*g*g | ttccgccag*c*g | ttaacgcc*g*c | gcrgcggt*a*a | ctgcgcca*g*y |
| aggcgttcac*g*c | cgctggcg*r*t | ctggcgct*g*g | cgatacgc*t*g | cgcgccag*c*a |
| gatgcggcgt*g*a | caatcgcca*g*c | gcgctggc*g*r | cgccagac*c*g | ggcgatac*c*g |
| tatcaggcct*a*c | cgccagcg*c*a | gaactggc*g*c | tcgccagcg*c*c | aacgcgcc*a*g |
| taggcctgat*a*a | cgccagtt*c*g | ggcaatcg*c*c | gcaactgg*c*g | ctggcgcg*c*g |
| gcctgatgc*g*c | ttacgccg*c*a | cgccagac*g*c | actggcgg*c*g | tgacgcca*g*a |
| ccagcgcc*g*c | atggcgtt*a*a | cggcatt*r*a | tgcggca*a*c | tggcatc*g*c |
| ctggctgg*c*g | attactgg*c*g | aacgcca*g*a | cggcagg*t*t | tctctgg*c*g |
| tgccgcca*g*y | aacgctgg*a*t | cgtctgg*c*a | aagcggg*c*g | tgcggtg*a*t |
| caggcgct*g*a | ggcgtta*a*s | tcaggcg*t*t | ctgacgg*t*t | acgtctg*g*c |
| ctttcgcc*a*g | cagcgcct*g*g | tccggca*g*t | aataccg*g*t | cgcgcag*c*t |
| cgctgacg*t*t | atcgccat*c*a | aaagcgc*c*g | ttcgcgc*t*g | gcgtggc*g*t |
| ccagcggc*g*t | ttccggca*g*c | ccggtaa*a*g | atcggcg*t*t | ccgcaac*c*g |
| gccgccag*a*c | acgccagc*c*a | acgccgc*a*g | acggtta*t*c | gatatcg*t*c |
| gattggcg*c*g | ctgcgtga*a*g | gcgcgta*a*t | gcgatac*c*a | cgttaat*g*g |
| cgctggaa*g*a | cgccatcg*c*g | gtgccgg*t*a | tggcgca*t*a | aaccggt*a*a |
| catccgcc*a*g | cgggcga*t*a | tcagcgc*g*a | cgcgtaa*a*c | cagcgtt*a*c |
| cagcgaac*t*g | atccggc*g*t | ccgggtt*a*a | aamgcgg*c*a | cagacgt*t*c |
| gattatcg*c*c | ccagccag*c*g | gactggc*g*c | cgctact*g*g | ccggaag*g*t |
| cgcgtctg*g*c | tggcgat*a*c | gaatacc*g*c | gcggtat*t*a | attgcctg*a*t |
| cgatctgg*c*g | ccagtac*g*c | tatcagg*c*g | ctgctgcc*g*g | tttttccg*c*c |
| cgccagca*g*g | aaaaagcc*g*c | tgctgac*g*g | ggtggcgg*c*a | gcggtt*t*c |
| tttcgcca*g*t | catcacgc*t*g | ctgccgc*g*c | cccgccgc*c*a | cgctaa*c*c |
| cgctgcgc*c*a | cgccagr*t*t | cattgcc*g*a | cgccg*t*a | catacc*g*g |
| gatcagcg*c*c | atacgct*g*g | aacggcg*a*a | cattgg*c*g | ggcgta*t*c |
| acgctgga*a*g | ttaacgg*c*g | tttaccg*t*c | ccggca*t*a | accgct*a*t |
| gcttccag*c*g | aacgccg*c*g | tattcag*c*g | cgcgtc*a*t | cccgcg*a*t |
| gccgcagg*c*g | acgcctg*a*t | gacgctg*a*t | ggttac*g*c | cgtagc*g*g |
| tgaccgcc*a*g | cggcgta*a*t | ttgcgcc*g*c | atgctgc*c*g | cgctgat*g*a |
| ggtgctgg*c*g | ggcgtac*t*g | tccgcca*g*g | atcgcct*t*c | tgcgtca*g*c |
| ggcggtga*t*g | atcaccat*c*g | accatcg*g*c | cttcgcc*a*t | ttttgcg*g*c |
| gcwgacgc*t*g | cgtcagca*a*a | cgcggcg*a*a | tgccggg*a*t | ccagcgt*g*t |
| ctgataag*c*g | cagcgttt*t*a | cagatcg*c*c | cgtcagc*a*c | cacgctg*g*t |
| cgctggcc*t*g | tgatggcg*g*c | atcaccg*g*a | tcagccc*g*g | gcttcag*c*g |
| gatgccgc*c*a | tcgctgcc*a*g | gaaacgc*c*g | attacgc*c*a | ttgcggc*a*g |

TABLE 23
TGA Primers for Detecting Franciscella tularensis (SEQ ID NOS
1781-1967, respectively, per column from left to right)

| | | | | |
|---|---|---|---|---|
| tagttaatcc*g*a | taggttctgt*g*c | ctatgttaaa*a*a | gctttagat*a*a | gatattac*t*a |
| cggattaact*a*t | gtagatataa*t*a | tatgataaag*a*t | agtattctc*t*a | ttgctata*g*c |
| tagcgactct*g*c | aaaaacttac*t*c | tctatataaa*a*t | tattgctat*a*g | tattgatg*a*t |
| gatatttgta*g*a | gtagaaatgt*t*a | ttaaaaaact*t*a | gctaaaga*t*a | tatagcta*t*a |
| ttactatagt*a*g | ataaaactct*a*t | gttattttat*a*t | gataagct*t*a | agatatta*t*c |
| atactccaac*c*t | tgatgtacaa*a*t | tataatcttt*t*t | gactatcaa*a*a | ttgataat*c*t |
| actatagtag*t*t | tatatccagc*a*a | atctatagc*t*a | gctaaaaaa*g*c | tagctata*a*t |
| gatagcatca*c*a | ataattatat*c*c | ttagcgat*a*t | gctatagat*t*t | gcwttagc*a*a |
| gctatttcaa*t*c | tagtttccat*a*a | agaaaaacta*a*a | agctaaag*a*t | tagtatta*t*c |
| tgaccatcct*c*t | ttattggcta*t*t | aatttttaat*c*a | tatctaaa*g*m | ttaccaat*a*g |
| tagacttggt*t*t | ctttttctac*a*a | tatmgcta*a*a | tagyttta*g*c | ctttagca*c*c |
| tgctaaaacc*t*c | taatgcttct*t*t | ttttagtttt*t*c | gctatagt*t*g | gcaactat*t*g |
| aacctttcat*g*t | actccaaaat*a*t | gttttgaaaa*a*t | ataactatc*a*a | taatgctga*t*a |
| gatagaaagc*t*t | ctttgtgttt*g*a | aaagtagct*a*t | tttagcta*a*a | tttgataa*t*m |
| atagatgaga*t*g | aaatgtactt*c*t | tatcaaaag*g*t | attagcta*t*a | takttgat*a*a |
| taatgctagt*t*t | aatcttttta*t*c | ttgcttggt*t*a | tctttagc*t*a | attgctaa*a*g |
| ttaagctt*a*t | cttattga*t*a | tttgataa*a*g | ctactaat*a*t | atagatga*t*a |
| tgattttga*t*a | tatagata*t*c | tctttatc*a*a | cataacta*t*a | tatcaaaa*g*t |
| taatatca*g*c | ttatctat*a*g | ctaatatt*a*t | ttatcaaa*a*t | atatcttg*a*t |
| cagctatt*g*c | atataact*c*t | tatcgcc*a*a | tttttgat*t*a | ttgctaaa*a*c |
| agtatcac*c*a | tggtattg*g*t | tatcaaac*t*t | taccaac*t*a | aaagatgg*t*g |
| gttggtga*t*a | cttttttat*c*a | tgttgatg*g*t | taaatcta*a*a | tattatca*g*t |
| ctaaagct*t*g | tacttcttt*t*a | aytatcag*c*a | ttatcata*a*a | tgataagt*t*t |
| gcaatagc*t*a | agcattag*c*t | aatttagc*t*a | tttgatak*t*a | tatatact*c*t |
| ttgctaaag*c*a | tactaata*t*y | tagtagta*t*t | ttggtaaa*a*a | tcaccatt*a*t |
| gataaaacc*a*t | aagattta*g*c | aactatca*a*t | tttatagc*t*t | aatatcta*t*c |
| atattgcta*a*t | agctataa*c*a | aaagttgc*t*a | ataatatc*t*a | atatcawt*a*c |
| ttttttag*c*t | ggtgatat*t*g | tttagctg*t*a | tgatgata*a*t | gatttatc*t*a |
| tgatattg*a*t | accagcta*a*a | caatatct*t*c | gctaataa*a*a | agcaactt*t*a |
| tgataaag*t*t | accataac*c*a | ataagctt*t*g | atatttta*g*c | ttagcttt*g*a |
| tttaccaa*t*a | gcgatatt*t*t | aamactat*c*a | ttatctaa*t*a | ttgatggt*g*a |
| agctaaag*c*a | gatggttt*a*g | cttgatga*t*a | atataact*a*a | taaatcaa*g*c |
| tttagata*a*g | ttatctaaa*a*g | atacttat*c*t | tcaaagat*a*t | tttttcga*t*a |
| agtattat*c*a | caatattat*c*a | atactatc*a*a | taaaccaa*t*a | ctcatcta*a*a |
| tgatttag*m*t | ttttgata*a*a | cttctaaa*g*c | agcttctt*t*a | tctagaga*a*t |
| tattatca*a*c | atcatcaa*a*a | ctttatca*a*g | attaaagc*t*a | |
| aatwgctg*a*t | caactat*a*g | gtatcaaa*g*a | gctgctga*t*a | |
| agtataga*t*a | aatatcat*c*a | tagaaatat*t*g | atataagt*t*a | |

TABLE 24
TGA Primers for Detecting Rickettsia (SEQ ID NOS 1968-2163,
respectively, per column from left to right)

| | | | | |
|---|---|---|---|---|
| taatatac*c*g | agtagtat*t*a | tactaaat*t*a | atattact*a*t | gcaaaagat*a*a |
| attatcgg*t*a | gctataat*a*t | taaatcta*t*a | tattatat*c*t | ataaacctt*t*a |
| taataccg*a*t | tactatat*c*a | atctatat*t*a | tatatcat*t*a | ctactattt*t*a |
| taatattagt*a*t | ttgataaatt*a*t | tgatatag*a*a | atctaata*t*t | attaatat*t*a |
| aatattac*c*g | aaagtaatat*t*a | ataatagg*t*a | tattattg*c*a | ttttagta*t*t |
| cggtaaaa*c*t | ttagtaaaaa*a*t | ctatagta*t*t | ttaatata*t*c | aactttaa*t*a |
| tctaatatat*t*a | tagttaaag*a*t | tactaatg*c*t | tctaatat*t*a | taatagta*a*a |
| aatactaata*t*t | gcattatta*c*t | ttacgtaa*a*t | tatcaata*t*a | aattatct*a*t |
| atattagtat*t*t | tttattacta*a*a | ataaataag*c*t | ttggtaat*a*a | tattaata*c*t |
| tttatctata*a*t | gcttataa*t*a | acgtaata*t*t | tactaaag*a*a | attattaa*g*t |
| tattgcga*t*a | ttaccgc*t*a | actattat*a*g | tattatc*g*g | attaataa*t*c |
| cggtaata*a*t | atagtatta*t*t | tattagtta*t*a | gctataat*t*a | atcggta*a*t |
| tagtaatac*t*a | tagtaata*t*c | actataga*a*g | taaagtag*t*a | aggtataa*a*a |
| gataatact*a*t | gcaagtaa*t*a | ctttatcta*t*t | attaatac*c*a | atacttaa*t*a |
| aaaaaaggtg*a*t | atattagta*a*t | aattagctt*t*a | ttatatag*c*t | tttttagc*t*a |
| tattacgt*a*a | wtaaagcta*a*t | ctattttag*t*a | taataaattt*t*t | ttttagata*t*t |
| ttattagtaa*t*a | tagtattttt*a*a | gataaaata*g*t | aatttagt*a*g | aatacaag*a*t |
| tactaatat*t*a | atattgataa*a*a | taataaattt*g*a | agctataa*t*a | atagtttt*a*g |
| ctatatta*c*c | tatctaaaaa*a*t | ttagctaaa*t*t | cattacta*t*a | aggtaaat*t*a |
| ttttatctaa*a*t | tagtattat*t*g | tattacttg*a*t | gcaataat*a*g | ataatgct*a*a |
| cggtaaaa*t*a | ttgctaaaaa*t*a | tctttagtt*a*a | tattatag*g*t | cttttact*a*t |
| tagtattat*y*a | aataatattg*a*t | taataata*t*t | attgaagt*a*g | ataagctt*t*a |
| aataatacta*t*t | taactaaag*a*t | ttttacta*t*a | taatctag*a*t | aattaatag*a*a |
| atctattac*t*a | attataggt*a*a | tttaatag*a*t | attactag*a*t | atttagtaa*a*t |
| gcaataatt*t*t | attgattt*a*c | | | |
| gtactaaa*a*t | taaagaatt*a*t | | | |
| atcattac*t*a | acctttat*t*a | | | |
| gtaatatt*g*a | tactatca*a*a | | | |
| attctata*g*a | caataata*t*c | | | |
| aaactact*a*t | ctcttaat*a*t | | | |
| tagtgata*t*a | aaactacc*t*a | | | |
| ataatgac*t*a | atattatga*t*t | | | |
| tacttaaa*t*c | ggtaataaa*a*a | | | |
| atagtatc*a*a | attctaaat*t*a | | | |
| atatttat*c*g | tattaaaa*a*t | | | |
| aatagtag*c*a | ttattaat*t*t | | | |
| tcctacta*a*a | ataaaatt*a*a | | | |
| tagtatta*g*a | aaataatt*a*t | | | |
| gttaattat*a*t | atataaat*t*t | | | |
| ctataaaat*c*a | taaatttt*c*t | | | |
| tcataatat*t*a | caataaaa*a*t | | | |
| agctttaat*a*a | ataattat*a*a | | | |
| ttagaaaaat*t*a | taattctt*t*t | | | |
| ttagtatat*a*a | aagatttt*t*a | | | |
| tttagataa*a*g | aaaaattg*a*t | | | |
| aaaatatt*a*t | tgccga*t*a | | | |
| taatttaa*t*a | aagaataa*t*a | | | |
| aatttctt*t*a | tgatttaa*a*t | | | |
| tttatctt*t*a | gataatc*t*a | | | |
| tttattac*t*t | ttgcgg*t*a | | | |
| ttttatta*t*c | | | | |
| atcaatat*t*t | | | | |
| agtaaaat*t*w | | | | |
| attacttt*t*a | | | | |
| tgaatata*a*a | | | | |
| agcaaatt*t*t | | | | |
| tagtac*c*g | | | | |
| aaattagt*a*t | | | | |
| atagattt*a*a | | | | |
| caagatat*t*t | | | | |
| tgcattat*t*a | | | | |
| tgaagatw*t*a | | | | |
| attatata*g*t | | | | |
| agattata*t*a | | | | |
| atacggt*a*t | | | | |
| tattttatc*a*a | | | | |
| atttacta*a*t | | | | |
| tcttttat*a*g | | | | |
| atagtaaaa*a*a | | | | |
| gctaaata*t*t | | | | |
| tataatta*a*c | | | | |
| atttttttg*a*t | | | | |
| tacaagta*t*t | | | | |
| tcatgatt*t*a | | | | |

### Example 22

### Amplification of K. pneumoniae Target Regions

[0377] To determine whether targeted genome amplification (TGA) could be used to amplify trace amounts of pathogen target DNA, 40 μl of human DNA (extracted from 200 μl of blood sample) was spiked with 20 copies of Klebsiella pneumoniae genome. The DNA samples were suspended in a buffer solution containing 50 mM Tris pH 7.6, 12 mM MgCl₂, 10 mM (NH₄)₂SO₄, 6.6% betaine, 21.6% trehalose, 2.5% DMSO, and 1.1% Tween-40. Primers to 16S and 23S regions as described herein were added. The final sample volume was 160 μl. The samples were incubated at 95° C. for 3 min, then cooled to 37° C., whereupon 32 U of Bst polymerase lacking exonuclease activity was added per reaction. Samples were incubated at 50° C. for 2 hours, then subjected to an enzyme-denaturing incubation at 80° C. for 10 minutes. Samples were held at 4° C. until further analysis.

[0378] FIG. 16 shows the results of analysis of K. pneumoniae TGA reactions as described above using quantitative real-time PCR (qPCR) to quantify K. pneumoniae 16S (Kp) copy number and human (Hs) Alu copy number in comparison to unamplified controls. The results indicate that the TGA reaction permitted a greater than 25-fold amplification of Kp 16S region despite the presence of a 6,000,000-fold excess of non-target human (Hs) DNA.

[0379] FIG. 17 shows the results of analysis of K. pneumoniae TGA reactions as described above using ESI-MS (electrospray ionizing mass spectrometry) with the Ibis T5000™ Biosensor system, where a calibrated Kp target DNA quantification was performed using a BCA plate. Results indicate that quantitation with two primer pairs referred to as 348 and 349, each directed to the 16S region, showed a 149-fold (for primer pair 348) and 66-fold (for primer pair 349) amplification of Kp genome in the TGA samples as compared to unamplified controls.

[0380] Table 25 shows that the limit of detection of TGA-amplified samples greatly exceeded that of the limit of detection of unamplified samples. Using the T5000 Biosensor system and primer pairs 348 or 349, signal was readily detected with as little as 1 μA of TGA reaction. In contrast, 10 μl of negative control (unamplified Kp-spiked human blood extract DNA) did not yield any detectable signal using the T5000 Biosensor assay.

TABLE 25
Limit of detection of 16S target region for K. pneumoniae-spiked
human DNA samples with and without TGA amplification.

| | | | | | 20 Kp/40 ul |
|---|---|---|---|---|---|
| | | Bst TGA Reaction | | | Blood Extract |
| | Primer | 10 ul/well | 5 ul/well | 1 ul/well | 10 ul/well |
| 16s | 348 | 233 | 163 | 93 | ND |
| 16s | 349 | ND | 155 | 41 | ND |

[0381] To determine whether any of the reagents used to perform TGA were contaminated with K. pneumoniae target DNA, no-template-controls (NTC) were analyzed using the T5000 Biosensor system and primer sets 346, 348, or 349 (for 16S target DNA) or primer set 361 (for 23S target DNA). FIG. 18 shows that no signal was detected using as much as 10 μl reaction per well.

### Example 23

### Additional Methods for Detecting Borrelia

[0382] Additional primers were developed for amplification of B. burgdorferi B31target regions, including primers longer than those used in set E (Example 20). New primers were developed on either side of each of one of the Spirochete targets. Parameters that were tested included 1) using the longer primers with fewer on each side, as well as 2) longer primers with the full 25 primers on each side of the target sequence. The new primers were compared to the original primers described in Example 20 (set E). The annealing temperatures were also varied to determine the optimal conditions. Table 25 includes additional primer sets, referred to as Primer Set “E2”.

TABLE 25
Additional primers used for TGA amplification
of B. burgdorferi target region 3511.
These primers referred to as the “E2 set”.

| | |
|---|---|
| Primer name | Sequence |

Set 3511E2 (SEQ ID NOS 2164-2188, respectively,
in order of appearance)

| | |
|---|---|
| 3511E2-F1 | CGT GAA GCT GCA AGAAAA |
| 3511E2-F2 | TGG AAA AGC AAT AAA AGC TGCTG |
| 3511E2-F3 | TGT TGT ATA TGA ACA TTT ATT GGAAAT |
| 3511E2-F4 | GCT TGG TAA TTC TGA GAT AAGAAA |
| 3511E2-F5 | CCT CAA TTT GAA GGT CAA ACAAA |
| 3511E2-F6 | ATT TTA AAG AGG GGC TTA CAGCT |
| 3511E2-F7 | GCC ATG AAT GAA GCT TTTAAA |
| 3511E2-F8 | CTC ATG TTA TGG GAT TTA GAA GTGG |
| 3511E2-F9 | CTG ACA ACA TTC TTT CTT TTG TTAA |
| 3511E2-F10 | TGT TAA TGT GGG GCT TAAATG |
| 3511E2-F11 | GCT TTT CAA TCA GAA CCT TATT |
| 3511E2-F12 | GAG GGT GGG ATA AAA TCT TTTT |
| 3511E2-R1 | TACCC ATT TTA GCA CTT CCT CCA |
| 3511E2-R2 | TGGCA AAA TGG CCT GAA AAA |
| 3511E2-R3 | TTGTT TTC TCA ACA TTA AGC ATT TT |
| 3511E2-R4 | ATCAT TGG TGA TAA CCT TAT CTT CT |
| 3511E2-R5 | ACTCC TGC ACC AAG AGAT |
| 3511E2-R6 | ATCTT GTG ATA ACG AAG TTT TGTA |
| 3511E2-R7 | TCCAT CAA CAT CGG CAT CTG |
| 3511E2-R8 | AAAAG CTA AAA GCA AAG TTC TAAT |
| 3511E2-R9 | ATATA TCC ATT TTC AAT TAA ATC TCT |
| | CAT |
| 3511E2-R10 | TATAA AGA GGA GGC ATG GCT |
| 3511E2-R11 | TAAAA ATA ATA AAT ACG ATT GTC ATA |
| | CTTT |
| 3511E2-R12 | TATTG CGA TTT TTA GTT TCA ATA GAA |
| 3511E2-R13 | CCCAA GCC CTT TAT ATC TCT GAA |

Set 3511EL (SEQ ID NOS 2189-2211, respectively,
in order of appearance)

| | |
|---|---|
| 3511EL-F13 | TGG TAA AGA AAA ATC TTC AAA ATT |
| 3511EL-F14 | CGA TAA AAT ATA CAT TTC AAT TGA AG |
| 3511EL-F15 | GGC TTA AAG AGC TTG C |
| 3511EL-F16 | AGA TTA TAA TTT CGA TGT TCT TGA |
| 3511EL-F17 | CGG ATT CTG AAA TTT TTG AAA |
| 3511EL-F18 | GGG GAC TAA GGT TAC TT |
| 3511EL-F19 | AGA AGT TGT GGG GGA ATC TTC |
| 3511EL-F20 | TGT GGG GGA ATC TTC |
| 3511EL-F21 | CTT TTT CAA AAG GTA TTC CG |
| 3511EL-F22 | GGT TTA TGT TAA TAG AGA TGG AA |
| 3511EL-F23 | GGT TGT AAA TGC TCT ATC TT |
| 3511EL-F24 | TGG TAA GTT TAA TAA AGG CAC |
| 3511EL-R14 | AGC TGC GTT GGA TT |
| 3511EL-R15 | CTA GCA GGA TCC ATA GTT |
| 3511EL-R16 | ATC ATC TAT ATT CAT CAA TCT CAT |
| 3511EL-R17 | GAG TAA CAA AAA TTT TTT CAG C |
| 3511EL-R18 | TTT CTG GGC TCA ACT AA |
| 3511EL-R19 | GAT TAA TTA CAT TAA GTG CAT TCT |
| 3511EL-R20 | CCA TTA ACG CTC CAA TT |
| 3511EL-R21 | TCC TAA CAT TTA ATA TTT GTT CTT |
| | TAT |
| 3511EL-R22 | GCA TAA TTT AAA TAA GAA GTT TTT |
| | ATT TC |
| 3511EL-R23 | GAA GAG CTC TAG AAA CAA TAA |
| 3511EL-R24 | TGG TTT AAG ACC ATC TCT T |

[0383] To test the new primer sets, human DNA was extracted from 1 ml blood to result in 200 μl DNA extract. The equivalent of 50 copies of B. burgdorferi B31 genome was added to each reaction. Amplification reactions were set up in which 225 μl total reaction volume included 1× PCR buffer, 197.04 μl sample, 1.8 μl dNTPs, 2.25 μl primer mix (at concentrations of 33 or 66 μM as detailed in FIG. 19), and 2.4 μl Bst polymerase. Samples were denatured at 95° C. for 10 minutes, held at annealing (primer extension) temperatures as indicated in FIG. 19 for an incubation time of 4 hours, and subjected to a polymerase inactivation step at 80° C. for 20 minutes and temperature hold at 4° C. Two microliters of each sample was analyzed per well using a TBS 5.0 plate for each of the indicated primers. Results shown in FIG. 19 indicate that the most fold amplification occurred at 56° C. using both the longer primers and the full set of 24 primers on each side of the target sequence.

[0384] An additional primer set, designated as “Set E3”, was designed as indicated in Table 26 below.

TABLE 26
Additional primers used for TGA amplification
of B. burgdorferi target regions 3517 (SEQ ID
NOS 2262-2311, respectively, in order of
appearance), 3514 (SEQ ID NOS 2212-2261,
respectively, in order of appearance), and
3511 (SEQ ID NOS 2312-2361, respectively,
in order of appearance). These
primers are referred to as the “E3 set”.

| Primer | Sequence |
|---|---|
| 3514E3-F1 | CCG AAA AAG ATG GGC TTTT |
| 3514E3-F2 | AGG TTA AAA AGT CCG AAA CTATT |
| 3514E3-F3 | TCT CCC GAT CAA ATT AGA AATTG |
| 3514E3-F4 | AAA GAG ATA AAA GAT TTT GAA AGA |
| | ATAAA |
| 3514E3-F5 | AAA GCT AGG TTT TTG GAG TTTT |
| 3514E3-F6 | ACA GAA AAA GAA GAA GAA TTG ATTAA |
| 3514E3-F7 | ATG ATG CTG GGA ATC AGGTTC |
| 3514E3-F8 | GGG CTT GGA CTT GATTTG |
| 3514E3-F9 | GTC TTT TAA TGT GCT AAT GCAAGA |
| 3514E3-F10 | GCG TTC CTA CTA ATG TAT CAGGG |
| 3514E3-F11 | GGC AGA GTT AAA ATA TAT GAA AAT ATAG |
| 3514E3-F12 | CAC CCT TCA AGA ACT TTT AACAG |
| 3514E3-F13 | GGC TCT TGA AGC TTA TGG |
| 3514E3-F14 | AGA CTT GGA GAA ATG GAG G |
| 3514E3-F15 | GAG GAA AGG CTC AAT TTG G |
| 3514E3-F16 | TCT TGT TTC TCA GCA ACC T |
| 3514E3-F17 | CGC AAG ATC AAC AGG C |
| 3514E3-F18 | ACT ACA CCA TCT TGT TGA TGA TA |
| 3514E3-F19 | GTA ATG GTT GGG GTG ATT TAC |
| 3514E3-F20 | GGA GAG CCG TTC GAA A |
| 3514E3-F21 | CCA ACT TCT AAA GAA ATT TTA TAT GAT |
| | GG |
| 3514E3-F22 | AGG AAA AAT TAA AAA CTG CTG GA |
| 3514E3-F23 | TGT TTT TGA ATC TGC TAC AAA TGA |
| 3514E3-F24 | CTG GTA AAT ATC TTG GTG AAT CTT ATA |
| | A |
| 3514E3-F25 | GGA CAG TTA ATG GAA TCT CAA T |
| 3514E3-R1 | ATA CCA AAT ATG AGC AAC TGGGGC |
| 3514E3-R2 | AAG CCC AAT CCT AGA GGGTA |
| 3514E3-R3 | TAG AAT TCA AAC TAG ATG CTG TAAT |
| 3514E3-R4 | CGG TTC AAT TAC TAC ATA TTT TTCATA |
| 3514E3-R5 | GCC CGG TTC AAT TAC TACA |
| 3514E3-R6 | TCT TCA TTT AAA AGC TGC ATTTTT |
| 3514E3-R7 | GCT CTC TAG CTT CTA TGT ACTCA |
| 3514E3-R8 | AAG CAT TAA AAG ACA TAC CAT ATCGC |
| 3514E3-R9 | GAA GAG TTT TAA TAG CCT CAGCCC |
| 3514E3-R10 | GAC GAA AGC TCA TCA AGATCA |
| 3514E3-R11 | CAG TTT TAT CAT CTT TAT CTA TCA |
| | TTTGAA |
| 3514E3-R12 | AAA TTC TCA ATA ATT TCA AGA CGTCTT |
| 3514E3-R13 | ATC CAC TCT GGC TTA TTGCCA |
| 3514E3-R14 | GGG GAA TAA CAG GAA GAA C |
| 3514E3-R15 | GCT GAA CCA TTG GCC |
| 3514E3-R16 | ATG TTG CAA AGC GCC |
| 3514E3-R17 | CGA TTA TTT CTA TTT ATG ACT CTT |
| | CTA TAA AGA TC |
| 3514E3-R18 | GCA TTA AGA AGA AGC AAC TTT CT |
| 3514E3-R19 | ATT CTT TTT TCG TTT CTC ACA ATA |
| | ATC |
| 3514E3-R20 | GTC AAA AAG AGA GTC TAC TGA TTC |
| 3514E3-R21 | GAA CCT TTG ACA ACC TTT CTT TTA |
| 3514E3-R22 | CGA CTT GAG AGG CCT |
| 3514E3-R23 | CCT GCT TAC CTT TTA ATG CAT |
| 3514E3-R24 | TTT TAC CAA GAA GAT TTT GCC TAA |
| 3514E3-R25 | CAA TAA CAG AAC GAC CAG AAT AA |
| 3517E3-F1 | TCT GCT TCT CAA AAT GTA AGAACA |
| 3517E3-F2 | TAA CCA AAT GCA CAT GTT ATCAAA |
| 3517E3-F3 | TTG CTG ATC AAG CTC AATAT |
| 3517E3-F4 | GCA ACT TAC AGA CGA AAT TAAT |
| 3517E3-F5 | AGA CAG AGG TTC TAT ACA AATTGA |
| 3517E3-F6 | AGG TAA CGG CAC ATA TTCAGA |
| 3517E3-F7 | TAA GAA TGA AGG AAT TGG CAGTT |
| 3517E3-F8 | AAT TTA AAT GAA GTA GAA AAA GTC |
| | TTAGT |
| 3517E3-F9 | GGC TAT TAA TTT TAT TCA GAC AACAGA |
| 3517E3-F10 | TTG TCA CAA GCT TCT AGA AATA |
| 3517E3-F11 | TTT CTG GTA AGA TTA ATG CTC AAAT |
| 3517E3-F12 | GAG CTT CTG ATG ATG CTGCT |
| 3517E3-F13 | GAA AAG CTT TCT AGT GGG TAC |
| 3517E3-F14 | CAT TAA CGC TGC TAA TCT TAG TAA |
| 3517E3-F15 | CAT CAG CTA TTA ATG CTT CAA GA |
| 3517E3-F16 | CAT GGA GGA ATG ATA TAT GAT TAT CAT |
| | G |
| 3517E3-F17 | TTT TTT TTT AAT TTT TGT GCT ATT CTT |
| | TTT AAC |
| 3517E3-F18 | TAA TAA TAA TTA TTT TTA ATG CTA TTG |
| | CTA TTT GC |
| 3517E3-F19 | ATT AAA GGC TTT TGA TTT TAA TCA AAG |
| | A |
| 3517E3-F20 | TTA AGC GCA TGA AAG ATC AAG |
| 3517E3-F21 | GTG GAA GGT GAA CTT AAT ACC |
| 3517E3-F22 | GAT TAT AAA AAG AAG TAC GAA GAT AGA |
| | GAG |
| 3517E3-F23 | TTA TTT TTT TGA TTA AAA ATT TTC AAG |
| | TCG TAA |
| 3517E3-F24 | GCT TCC GGA GGA GTT ATT TAT |
| 3517E3-F25 | TAG GAG ATT GTC TGT CGC |
| 3517E3-R1 | GCA ACA TTA GCT GCA TAA ATAT |
| 3517E3-R2 | TCC CTC ACC AGA GAAAAG |
| 3517E3-R3 | ACA CCC TCT TGA ACC GGTG |
| 3517E3-R4 | TGA GAA GGT GCT GTA GCAGG |
| 3517E3-R5 | TTG TAA CAT TAA CAG GAG AAT TAACTC |
| 3517E3-R6 | TTA GCA AGT GAT GTA TTA GCATCA |
| 3517E3-R7 | TGA TCA CTT ATC ATT CTA ATA GCATTT |
| 3517E3-R8 | CTA TTT TGG AAA GCA CCT AAAT |
| 3517E3-R9 | GCA TAC TCA GTA CTA TTC TTT ATAGAT |
| 3517E3-R10 | TGA GCA TAA GAT GCT TTT AGATTT |
| 3517E3-R11 | TCT GTC ATT GTA GCA TCT TTTA |
| 3517E3-R12 | TTA AAA TAC TAT TAG TTG TTG CTG CTAC |
| 3517E3-R13 | ATT AGC CTG CGC AATCAT |
| 3517E3-R14 | GCA ATG ACA AAA CAT ATT GGG |
| 3517E3-R15 | TTA ATA CAA TTT ATA CCA ATT AAA CTA |
| | GAA TTT T |
| 3517E3-R16 | ATA AAA AAA CAA AAG ATC CTT TAA AGG |
| | ATC |
| 3517E3-R17 | ATAAATTATACTAAAATTATTAAATTTTTGCCGAT |
| 3517E3-R18 | GCC TGC ATT ATG CTT TAT AAC A |
| 3517E3-R19 | CCT ACT CAA AGC AAA CTC C |
| 3517E3-R20 | CGA AAA TAC TTT ATA ACA ATC TTT AAT |
| | TTT AAC A |
| 3517E3-R21 | TCG ACT TAT CTG CTT TTT GTT AAC |
| 3517E3-R22 | CTA TCT TTG CCA TCT TCA TAG TC |
| 3517E3-R23 | GCA ATA AAA ATA GAA GAT TCT TTG TAG |
| | AT |
| 3517E3-R24 | TAA AAT TTC ATT TTC ATA AAC ATC AAG |
| | ATT AAT A |
| 3517E3-R25 | GCC CGA CAT ACC CA |
| 3511E3-F1 | CGTGAAGCTGCAAGAAAA |
| 3511E3-F2 | TGGAAAAGCAATAAAAGCTGCTG |
| 3511E3-F3 | TGTTGTATATGAACATTTATTGGAAAT |
| 3511E3-F4 | GCTTGGTAATTCTGAGATAAGAAA |
| 3511E3-F5 | CCTCAATTTGAAGGTCAAACAAA |
| 3511E3-F6 | ATTTTAAAGAGGGGCTTACAGCT |
| 3511E3-F7 | GCCATGAATGAAGCTTTTAAA |
| 3511E3-F8 | CTCATGTTATGGGATTTAGAAGTGG |
| 3511E3-F9 | CTGACAACATTCTTTCTTTTGTTAA |
| 3511E3-F10 | TGTTAATGTGGGGCTTAAATG |
| 3511E3-F11 | GCTTTTCAATCAGAACCTTATT |
| 3511E3-F12 | GAGGGTGGGATAAAATCTTTTT |
| 3511E3-F13 | TGGTAAAGAAAAATCTTCAAAATTTTAT |
| 3511E3-F14 | CGATAAAATATACATTTCAATTGAAGATAA |
| 3511E3-F15 | GGCTTAAAGAGCTTGCTTTT |
| 3511E3-F16 | AGATTATAATTTCGATGTTCTTGAAAAA |
| 3511E3-F17 | CGGATTCTGAAATTTTTGAAACTTT |
| 3511E3-F18 | GGGGACTAAGGTTACTTTTTT |
| 3511E3-F19 | AGAAGTTGTGGGGGAATCTTCTGTT |
| 3511E3-F20 | CTTTTTCAAAAGGTATTCCGACTT |
| 3511E3-F21 | GGTTTATGTTAATAGAGATGGAAAAAT |
| 3511E3-F22 | GGTTGTAAATGCTCTATCTTCGTT |
| 3511E3-F23 | TGGTAAGTTTAATAAAGGCACGTAT |
| 3511E3-F24 | CCT TGA ACT TGT TTT AAC AAA ATT AC |
| 3511E3-F25 | ACC GAT ATT CAT GAA GAG GAG |
| 3511E3-R1 | TACCCATTTTAGCACTTCCTCCA |
| 3511E3-R2 | TGGCAAAATGGCCTGAAAAA |
| 3511E3-R3 | TTGTTTTCTCAACATTAAGCATTTT |
| 3511E3-R4 | ATCATTGGTGATAACCTTATCTTCT |
| 3511E3-R5 | ACTCCTGCACCAAGAGAT |
| 3511E3-R6 | ATCTTGTGATAACGAAGTTTTGTA |
| 3511E3-R7 | TCCATCAACATCGGCATCTG |
| 3511E3-R8 | AAAAGCTAAAAGCAAAGTTCTAAT |
| 3511E3-R9 | ATATATCCATTTTCAATTAAATCTCTCAT |
| 3511E3-R10 | TATAAAGAGGAGGCATGGCT |
| 3511E3-R11 | TAAAAATAATAAATACGATTGTCATACTTT |
| 3511E3-R12 | TATTGCGATTTTTAGTTTCAATAGAA |
| 3511E3-R13 | CCCAAGCCCTTTATATCTCTGAA |
| 3511E3-R14 | AGCTGCGTTGGATTCATC |
| 3511E3-R15 | CTAGCAGGATCCATAGTTGTTT |
| 3511E3-R16 | ATCATCTATATTCATCAATCTCATTTTT |
| 3511E3-R17 | GAGTAACAAAAATTTTTTCAGCTTCA |
| 3511E3-R18 | TTTCTGGGCTCAACTAAATCT |
| 3511E3-R19 | GATTAATTACATTAAGTGCATTCTGTTC |
| 3511E3-R20 | CCATTAACGCTCCAATTACAC |
| 3511E3-R21 | TCCTAACATTTAATATTTGTTCTTTATTTTC |
| 3511E3-R22 | GCATAATTTAAATAAGAAGTTTTTATTTCATCT |
| 3511E3-R23 | GAAGAGCTCTAGAAACAATAACTGA |
| 3511E3-R24 | TGGTTTAAGACCATCTCTTACGT |
| 3511E3-R25 | CTC ATA CAT AGA ATA AAG TAT TCT CCT |
| | G |

[0385] Human DNA was extracted from 1 ml blood to result in 200 μA DNA extract. The equivalent of 50 copies of B. burgdorferi B31 genome was added to each reaction. Amplification reactions were set up, each with a total volume of 225 μl as described supra. Primer extension was conducted for 4 hours at the annealing temperatures indicated in FIG. 20, followed by incubation for 20 minutes at 80° C. and hold at 4° C. Five microliters of each sample were analyzed with using a TBS 5.0 plate. Results are shown in FIG. 20, where “3p mix” refers to “set E” primers.

[0386] An expanded set of primers was developed to encompass 7 different regions for detection of Borrelia target DNA, as shown in Table 27.

TABLE 27
Additional primers used for TGA amplification of B. burgdorferi
target regions 3519 (SEQ ID NOS 2362-2411, respectively, in
order of appearance), 3520 (SEQ ID NOS 2362-2411, respectively,
in order of appearance), 3516 (SEQ ID NOS 2412-2461, respectively,
in order of appearance), 3515 (SEQ ID NOS 2462-2511, respectively,
in order of appearance), and 3518 (SEQ ID NOS 2512-2561,
respectively, in order of appearance). These primers referred
to as the “8E3 set” in combination with the previous “E3 set”
(Table 26).

| Primer name | Sequence |
|---|---|
| 3519-20E3-F1 | CCC ACA CTC TCT CTT TCA AA |
| 3519-20E3-F2 | GAT ATT AAC CGG CAT TTA ACC TT |
| 3519-20E3-F3 | TCT AGC TTA CAA TCC CAT TTA TAA GA |
| 3519-20E3-F4 | CCT TCA AAT TTT AAT TTT CCT CTA AAA GTT A |
| 3519-20E3-F5 | CCT TCA AAA GAA GAA TCA AGA TAC AA |
| 3519-20E3-F6 | CAC ACC CCC TTT TGA AGA TA |
| 3519-20E3-F7 | GTA ATA ACC TTA CTA TTC TTG CCA ATA |
| 3519-20E3-F8 | TTC TAC TAT TAA TGT ATC ACA AAT TAC CAC |
| 3519-20E3-F9 | GCA TTT ACA TTG CCC TTC AA |
| 3519-20E3-F10 | CAA CCG CTG TTT AAA TAA ACC TT |
| 3519-20E3-F11 | AAT ATT TTT TTT GTT TTT ACA TCC CCA TAT |
| 3519-20E3-F12 | CAC ACT TAC CAT CAA AAA TTA TAT TAT CAT |
| 3519-20E3-F13 | AAG AAA ATA AAT CTA CAA TTT CAT TAG ACT TTA |
| 3519-20E3-F14 | CAA AGT ATC TTT TAT TTG TGA AAC GG |
| 3519-20E3-F15 | TCT ACT TAT TAT TAA TTA ATA AAA AAC ACT GAC C |
| 3519-20E3-F16 | CTC TAC GAA TTA AAT TTT TAA GAA AGG ATT TTA |
| 3519-20E3-F17 | ATC AAA TCC ACC ATT TTT TTT ATC CA |
| 3519-20E3-F18 | CCA ACC GCC TTA TTT CAC |
| 3519-20E3-F19 | TTT TCA AAT TAT CTT CAA TCT TAA ACT CTT TAG |
| 3519-20E3-F20 | TTT TAG CAA CAA CTT TAA CCA CTT T |
| 3519-20E3-F21 | TGT CAC GCT AGA TGC AG |
| 3519-20E3-F22 | CTT TAC GCC ACT TAA ATC TGC |
| 3519-20E3-F23 | AAT CAG AAA ATA TTA CCC CGT TTG |
| 3519-20E3-F24 | ATA TTA TTT TCT AAA CCT GAA GAA GGA ATA T |
| 3519-20E3-F25 | CAT TAA AAA ATT TGA TGA TAT TAC TTT GCT C |
| 3519-20E3-R1 | GTT TTG CTG TTA AAG TAA GGA AAT TAG |
| 3519-20E3-R2 | GCT GCT AGA AAA AAA TCT CGT T |
| 3519-20E3-R3 | CTG CTA GAA AGC GAA TAA TTC ATA A |
| 3519-20E3-R4 | GAA TTT TTT AAA TTT GTT GCA AAA AAA CTA G |
| 3519-20E3-R5 | GCG GGT AAG AAA GAC GAA |
| 3519-20E3-R6 | GAA AAA CGC TGT ATC AAC ATG A |
| 3519-20E3-R7 | ATT AGA AAT GTA AGT GTA AAA AGT GAA TTA AAA |
| 3519-20E3-R8 | CGC TCT CGT CAA AAT TTA AAA AG |
| 3519-20E3-R9 | CTT GAG AAA AAA TGC ATC TGC |
| 3519-20E3-R10 | GAT ATA TTA AAG CTA TTG TTT AAT AAT ATT ATT AAG GA |
| 3519-20E3-R11 | ATT AAC TTA AAT CTT TGA TTG ACT ATA TTT GAA T |
| 3519-20E3-R12 | AGG TTT TTG AAT ATA TTA ATC AAA ACT ATT GT |
| 3519-20E3-R13 | ATT TTG AAT AAA AAA ATT TCT TAT TCC ATG C |
| 3519-20E3-R14 | CAA AGA AAA TCA TCA GAC AAA AAA GG |
| 3519-20E3-R15 | GAA TTT GAA TTT AAC AAT AAA AAT TAT TTA TGC TT |
| 3519-20E3-R16 | GAA TTT TTT GAA AAA ATT TTT ATT GCC AG |
| 3519-20E3-R17 | CTG TGA AAG AAA AAT TTT TAA AAG TGA AAT |
| 3519-20E3-R18 | CAA TAT AGT GTT ATT TTA TGA GTT TAG GAA AG |
| 3519-20E3-R19 | TTT TGT TGG GGG ATT TTT CAG |
| 3519-20E3-R20 | TTT TGT TGG GGG ATT TTT CAG |
| 3519-20E3-R21 | GCA ATA TAT TTA TTT TTT TAT TTA TTT GTT TTA TTG ATA |
| | TTA |
| 3519-20E3-R22 | GTA TTA TGA TTG CTT TAT TTG TTT ATT ACA TTT C |
| 3519-20E3-R23 | GAT ATT ATT TAT CTT GTA CTT ATC TTT TTA TGT TTT |
| 3519-20E3-R24 | GTC CCA AAA TTG GAA AAT TTT CC |
| 3519-20E3-R25 | TAT TTA AAG AGC TTA AAA TTA AGA GAA AAG ATC |
| 3516E3-F1 | CCT ATC CTT CTG CCA ACG |
| 3516E3-F2 | GGA AAA AAG ATT GTA TAT ACT TGA CAT G |
| 3516E3-F3 | CAA AGT AGA AGA AGA TCC AAG TAT TC |
| 3516E3-F4 | GGC AAG AAT TTT GGG ATA ATA ACA |
| 3516E3-F5 | TGT CTA AAT ACG AAT TCA TAA AAA TTG AAA |
| 3516E3-F6 | GAA TAA GTT GTT ATG AGT TAA TTT TCA AGA |
| 3516E3-F7 | TAA ATA AAA TTA ACA AAA ATG CAA TCT AAA AGA A |
| 3516E3-F8 | CAC AGC ATC AAA ATT GTT AGC |
| 3516E3-F9 | CCG TGC TGG TTC AAG |
| 3516E3-F10 | GAG GGG CTA GTG GG |
| 3516E3-F11 | GGA AGT GGT AGA CAC GC |
| 3516E3-F12 | AAA AAA TAT AAT GGT TAA TAG TGC TGT G |
| 3516E3-F13 | GTA ATT AAA AAA AAT AAA AAA GTT GAC AAA AAT T |
| 3516E3-F14 | CGC TGT AAT AGC AAC AAC AAT AAT A |
| 3516E3-F15 | AAT AAT ATT TTC AAA AAT AAA AAT AAT TAT ATT TGC AA |
| 3516E3-F16 | CTC TAA GCT TCA AAC TAG GTC A |
| 3516E3-F17 | AAC TTT GCT CTC AAT AGT TGT TT |
| 3516E3-F18 | TAT GAA ATC TAA TCT ATT TAT TGT TTC TGA CT |
| 3516E3-F19 | GCA ATA TTT ATG TCA GCA GGA A |
| 3516E3-F20 | GAA GGT TTA TAC CCT TTG GAG |
| 3516E3-F21 | TGG TCA ATA TGG GGT ATT AAC TTT AT |
| 3516E3-F22 | CAA TAA CCT GCT TGA CAA AAT AAA TTA |
| 3516E3-F23 | GGA AAT TAA TGG GAA ATA AAT TAT TTA AAA ACA |
| 3516E3-F24 | AGA CAT AAT ATC TTT TTA CAT TGG GAA A |
| 3516E3-F25 | TTT AGG AAT TTT TTG GGG AGC |
| 3516E3-R1 | TGA GGG TGA GTT CCT GT |
| 3516E3-R2 | TTG TTT TTT AAA CTT ATT AAT ATT TTC TTC TGT AC |
| 3516E3-R3 | GGC AAA CCC CAA AGC |
| 3516E3-R4 | GTG TTC TAA TTT CTC GAT CCC |
| 3516E3-R5 | ACT GTG TCC ATT TAT AGT AAT TCT C |
| 3516E3-R6 | CTA GCC CTT TTT TAT ATA ATT GCA GG |
| 3516E3-R7 | GTA CCA TAC AGG CAT TTC TTT TA |
| 3516E3-R8 | CTA GTA CCG TTC CAA GCT |
| 3516E3-R9 | GTC CAT CTG AAG TTT GAA TAA TCT C |
| 3516E3-R10 | ACG CTG TAA GAT CCT CTC |
| 3516E3-R11 | GTA ATT TTT AAA ACC CAC TGT CTT AAA TA |
| 3516E3-R12 | CGT CTA GCA ATC TTT CAG C |
| 3516E3-R13 | AGA TTC AGG CCA TTC TAA TTC T |
| 3516E3-R14 | TCC AAT TTC GCT GCA TTT C |
| 3516E3-R15 | AAT TCA ATT TCA ACT CCT GTT GAT |
| 3516E3-R16 | TTT TAT CGC TGT GGC CTT |
| 3516E3-R17 | CTT TAC AAC AAG GCC AGA C |
| 3516E3-R18 | CGA TCA CTA AAT ATG TGA TGC C |
| 3516E3-R19 | GTT GTT CTT TGT TAT TTT TTC TAT TAG TTT ATT |
| 3516E3-R20 | CTT CGT GCT TTA CAT ATT TTA AAA CAT T |
| 3516E3-R21 | GAG AAG TCC TAT TAA GAT CGC T |
| 3516E3-R22 | CTG TGA AAA CTC CCG ATT TAT C |
| 3516E3-R23 | CAT TTG TTA TTG GAT GAA ATG CG |
| 3516E3-R24 | GCT TCC AAC CCA AAT TG |
| 3516E3-R25 | CGG TTC CGT AAG TTC CT |
| 3515E3-F1 | GTG TTG CTA TGA ATC CTG TTG |
| 3515E3-F2 | GGT AGA AGA CCC AAG GT |
| 3515E3-F3 | GGA AAG CTG GTA AAA GTA GG |
| 3515E3-F4 | TGG AAA TGA AGA TTA TGC CAA TAT TT |
| 3515E3-F5 | TTT TTA AAA AAT GTA TTG CAA CAA TTG G |
| 3515E3-F6 | TTA TCA TCT GGC GAG ATG AG |
| 3515E3-F7 | GAC GGG AAT TAT GTC ACT G |
| 3515E3-F8 | GGT GGA TAT GCT ATG ATA CTT G |
| 3515E3-F9 | GGG TGG ACA GCT TAT AAG A |
| 3515E3-F10 | CGT TCA CAA TAT TGA GCT TAA TGT |
| 3515E3-F11 | CTT ACC TCT TGA AAA TAT TCC TAT TGG |
| 3515E3-F12 | CTA ATG CTC CAA TTA AAA TTG GC |
| 3515E3-F13 | GGT TGG AGA TGT TTT GGA AAG |
| 3515E3-F14 | AAA GGT ATA TTA TTT CTC CTA AAG GC |
| 3515E3-F15 | GCT AAT ATA GCT TTG CTT GTT TAT AAA G |
| 3515E3-F16 | GTT GCT TCT ATT GAA TAT GAT CCT AA |
| 3515E3-F17 | CGA AGA GAT AAA TTT AGC ATT CCT G |
| 3515E3-F18 | GCA TAA GAG AAA GTA TAG GTT GAT TG |
| 3515E3-F19 | CTG GTA GGA TTA GTA TTA GAA GAA GAG |
| 3515E3-F20 | AAA AGG TAA AAA ATT TAA ATC GGG C |
| 3515E3-F21 | CAA AGG TAA TGA TCC TTT GAA ATC |
| 3515E3-F22 | GCT ATA AGA CGA CTT TAT CTT TTG AT |
| 3515E3-F23 | AGA CTT ATA AGC CAA AAA CTT CTT C |
| 3515E3-F24 | GGT TTT GGA GAA AAA TAA ATA TGG G |
| 3515E3-F25 | CAA AAA GGA AGA TAA AAT AGA TAT TTT TTA GTG |
| 3515E3-R1 | TTT CTT GCG AGT CTT ATA ACC T |
| 3515E3-R2 | TTT ATT TCT TCT TTT AAT AAT AAA TTT ATC TGA ATA TC |
| 3515E3-R3 | TTT TTT AAT AGA TCT TGC CAC TAT ACT C |
| 3515E3-R4 | ACT TTT TGA TAA AGA CTC TTT TCT ATA AAA G |
| 3515E3-R5 | CTT CTC ACT TCC AAA AGA CG |
| 3515E3-R6 | AAG ATC TGG AGT AGG TTT TAA TAA C |
| 3515E3-R7 | GGC TTA CCA TTT CAG GAA TTA T |
| 3515E3-R8 | AAG TTT TGC CAT TGT AAA CAG ATA T |
| 3515E3-R9 | CAA GAT CCT CGG TAA TAT AAA TAG GT |
| 3515E3-R10 | CTC GCC AAG CTT ATG TC |
| 3515E3-R11 | CCT CTA AAA ATC CTT GTA GGT G |
| 3515E3-R12 | CCT CTA AAA ATC CTT GTA GGT G |
| 3515E3-R13 | CTT CCC TTT TTA TCT GAC TTA GC |
| 3515E3-R14 | ATC TTC TAT TTA CCA ACA TAA CTA CTT AC |
| 3515E3-R15 | AGG GTA AAT TTT TGC CCT TTG |
| 3515E3-R16 | CTA TTG GCC TAA CTT TTT TTG G |
| 3515E3-R17 | AGA CTC TCC CCG GAT ATT |
| 3515E3-R18 | AAA GCA CTG CAA TAG CC |
| 3515E3-R19 | TAA AAG CTT AGC TCC TTT ATT AGG |
| 3515E3-R20 | TGA TGC TGC TGA CTT AAC AA |
| 3515E3-R21 | CTC GGA AAG ATT TTT ATT GTG ATA CA |
| 3515E3-R22 | CAT CAA CCA TAA CTG TTT TAA CAA ATA TC |
| 3515E3-R23 | GCC AAA TCT TTT TAC GAC GAC |
| 3515E3-R24 | TAT CAG CTC TAC CCC TAG C |
| 3515E3-R25 | CTT CAA CAA AAA TAT GAC AAT TTC TAT TAA C |
| 3518E3-F1 | TTA ATG AAA AAG AAT ACA TTA AGT GCA ATA T |
| 3518E3-F2 | CTA ATA ATT CAT AAA TAA AAA GGA GGC AC |
| 3518E3-F3 | TTT TCA AAT AAA AAA TTG AAA AAC AAA ATT GT |
| 3518E3-F4 | AAT ATT TAT TCA AGA TAT TGA AGA ATT TGA AAA A |
| 3518E3-F5 | TTT AAA ATC AAA TTA AGA CAA TAT TTT TCA AAT TC |
| 3518E3-F6 | AGC ATA TTT GGC TTT GCT TAT G |
| 3518E3-F7 | AAA TTA AAA CTT TTT TTA TTA AAG TAT ACT TCA TTT AA |
| 3518E3-F8 | GCC TGA GTA TTC ATT ATA TAA GTC C |
| 3518E3-F9 | TAT ATT GGG ATC CAA AAT CTA ATA CAA G |
| 3518E3-F10 | CAA TTT CTC TAA TTC TTC TTG CAA TTA G |
| 3518E3-F11 | GGA GTA TAG TAA GGT ATT ACT TTT GTA TAA A |
| 3518E3-F12 | TTC CTG AGA TAT TCA TAT TTT TAA TTT CTT TT |
| 3518E3-F13 | GCA GGA CTT CCA CTT AGT A |
| 3518E3-F14 | GGT AGG AGC TTC TTT TGA ATA AAC |
| 3518E3-F15 | CAA AAT AGG TAT TTT CAA ATT AAA AAT TTC CAT A |
| 3518E3-F16 | AAT TTA ACA ATT ATT TGC ATT CCA TAA CAT A |
| 3518E3-F17 | GCT TAG AGT CTT TAG ATA CTA GGC |
| 3518E3-F18 | AAA GAT TTC AGA GCT CCC ATA T |
| 3518E3-F19 | TTC TGA AAA TAA AAG AGA TTT TTC ATC TC |
| 3518E3-F20 | TGA CTC ATG ATA ATT TGA AAT TTG TTT G |
| 3518E3-F21 | AAA TTA TCA GGA ATT TTT TCA ATA CTG TC |
| 3518E3-F22 | GCA ATA CAA TTT TTT GTA AAA GCT AAT TG |
| 3518E3-F23 | CCG TAA ATT TTT TGA GTT TCA TTT GAT |
| 3518E3-F24 | AGT TAC TTC TGG ATG GAA TTG T |
| 3518E3-F25 | AAT TTT TAA TTA TTT GAT CAC CAA ATT CAG |
| 3518E3-R1 | ACC GCA TTA GAA TCC GTA AT |
| 3518E3-R2 | ACC TCT TTC ACA GCA AGT T |
| 3518E3-R3 | CAT CTA TAG ATG ACA GCA ACG |
| 3518E3-R4 | TTA CCA ATA GCT TTA GCA GCA |
| 3518E3-R5 | GTA TCC AAA CCA TTA TTT TGG TGT A |
| 3518E3-R6 | GCT AAC AAT GAT CCA TTG TGA TTA T |
| 3518E3-R7 | TAT TAG GGT TGA TAT TGC ATA AGC |
| 3518E3-R8 | CTT CAT TTT TCA ATC CAT CTA ATT TTT G |
| 3518E3-R9 | TTA GCC GCA TCA ATT TTT TCC |
| 3518E3-R10 | TCT TTT AAT TTA TTA GTA AAT GTT TCA GAA CA |
| 3518E3-R11 | CTT CTT TAC CAA GAT CTG TGT G |
| 3518E3-R12 | CTT TTG CAT CAG CAT CAG T |
| 3518E3-R13 | TTT AGT TTT AGT ACC ATT TGT TTT TAA AAT G |
| 3518E3-R14 | GAT TCA AAT AAT TTT CCA AGT TCT TCA G |
| 3518E3-R15 | CTG CTT TTG ACA AGA CCT C |
| 3518E3-R16 | TTT AAC TGA ATT AGC AAG CAT CTC |
| 3518E3-R17 | CCA CAA CAG GGC TTG |
| 3518E3-R18 | GAT CTT AAT TAA GGT TTT TTT GGA CTT |
| 3518E3-R19 | CCA GTT ACT TTT TTA AAA CAA ATT AAT CTT ATA |
| 3518E3-R20 | AGA AAT CTT TCT TGA CTT ATA TTG ACT TT |
| 3518E3-R21 | GAA TTT TAA GAA ATT TTT TGA GAA AAT AAA AAA ATA AAA |
| 3518E3-R22 | TAT TCT TTA AGA GAA GAG CTT AAA GTT |
| 3518E3-R23 | AAA TTC AAT TTA TTA ACG GCT TTT GTA ATA |
| 3518E3-R24 | TCT AGC ACC CAA TTT TGT TTA TAT TTA |
| 3518E3-R25 | GTT TAA GCC TAC TTA AAG TCT TTA AAA TC |

[0387] The new 8E3 primer set was tested for its ability to amplify Borrelia burgdorferi DNA and compared to the previously used E3 primer set, which targeted 3511, 3514, and 3517. Amplification samples were set up as described previously, where 30 genome copies B. burgdorferi were added to 200 μl human DNA extracted from 1 ml blood, and total reaction volume was 225 μl. Primer sets were added as shown in Table 28. Samples were mixed (with the exception of polymerase) in 0.6 ml PCR tubes, denatured at 95° C. for 10 minutes, cooled to 60° C., and then Bst polymerase was added. Samples were mixed by vortexing, centrifuged briefly, then incubated at 56° C. for 4 hours. Polymerase was inactivated by incubation at 80° C. for 20 minutes, and samples were held at 4° C. until analysis.

TABLE 28
Primer sets and primer concentrations
used for experiment shown in FIG. 10.

| | Primer | Initial primer | Final |
|---|---|---|---|
| Mix | Set | conc (uM) | conc (uM) |
| 1 | E3 | 1000 | 10 |
| 2 | E3 | 100 | 1 |
| 3 | 8E3 | 1000 | 30 |
| 4 | 8E3 | 1000 | 10 |
| 5 | 8E3 | 100 | 1 |
| 6 | 8E3 | 100 | 0.2 |

[0388] Following TGA amplification, samples were treated with calf intestinal phosphatase (CIP) by adding 2 μA CIP per reaction, followed by vortexing, brief centrifugation, and incubation at 37° C. for 30 minutes, then heat inactivation at 95° C. for 15 minutes and hold at 4° C. Samples were then analyzed using a Borrelia Multilocus Sequence Typing (MLST) genotyping plate using 5 μl of each sample per well, followed by processing on an Eppendorf procycler and analysis on a PlexID unit. Results are shown in FIG. 21. The 8E3 primer set provided a similar level of amplification to the E3 primer set for the different MLST targets. There was little variation in fold amplification noted when the final concentration of primer mix was varied from 30 μM to 1 μM.

[0389] The methods were then applied on a series of clinical blood samples from human patients with suspected Lyme Borreliosis. Two sets of DNA extractions were performed. The first set of extractions was analyzed directly on the Borrelia MLST plate described herein, while the other set of extractions was first amplified using the TGA method and then subjected to analysis with the Borrelia MLST plate. The TGA reactions were set up using 1× PCR buffer, 199.3 μl sample, 0.2 mM (each) dNTPs, primers as indicated infra, and 0.05 U/μl Bst polymerase. Results are shown in Table 29. In total, signal was observed for 2 of 29 unamplified samples, but 14 of 29 amplified samples. The TGA treatment increased the sensitivity of detection of Lyme borreliosis in blood. 12 samples that were negative when run untreated were found to be positive for Borrelia burgdorferi after TGA treatment.

TABLE 29
Analysis of human clinical (blood) samples
for Borrelia MLST signals.

| | Neat untreated | Borrelia TGA |
|---|---|---|
| | (Detected/Total | (Detected/Total |
| Sample | Primers) | Primers) |
| JHU 01-020.v1 | 0/8 | 0/8 |
| JHU 01-023.v1 | 0/8 | 0/8 |
| JHU 01-024.v1 | 0/8 | 0/8 |
| JHU 01-025.v1 | 0/8 | 0/8 |
| JHU 01-026.v1 | 0/8 | 8/8 |
| JHU 01-027.v1 | 0/8 | 0/8 |
| JHU 01-028.v1 | 0/8 | 0/8 |
| JHU 01-029.v1 | 0/8 | 0/8 |
| JHU 01-030.v1 | 0/8 | 0/8 |
| JHU 01-031.v1 | 0/8 | 0/8 |
| JHU 01-032.v1 | 0/8 | 0/8 |
| JHU 01-033.v1 | 0/8 | 8/8 |
| JHU 01-034.v1 | 0/8 | 0/8 |
| JHU 01-036.v1 | 0/8 | 1/8 |
| JHU 01-037.v1 | 0/8 | 8/8 |
| JHU 01-039.v1 | 0/8 | 0/8 |
| JHU 01-040.v1 | 0/8 | 7/8 |
| JHU 01-042.v1 | 0/8 | 0/8 |
| JHU 01-044.v1 | 0/8 | 6/8 |
| JHU 01-045.v1 | 0/8 | 6/8 |
| JHU 01-046.v1 | 0/8 | 8/8 |
| JHU 01-047.v1 | 0/8 | 8/8 |
| JHU 01-048.v1 | 0/8 | 0/8 |
| JHU 01-049.v1 | 0/8 | 1/8 |
| JHU 01-050.v1 | 0/8 | 0/8 |
| JHU 01-051.v1 | 1/8 | 8/8 |
| JHU 01-052.v1 | 0/8 | 8/8 |
| JHU 01-053.v1 | 3/8 | 8/8 |
| JHU 01-054.v1 | 0/8 | 3/8 |
| JHU 02-J-1 (negative | 0/8 | 0/8 |
| control blood) | | |
| JHU 02-S-1 (negative | 0/8 | 0/8 |
| control blood) | | |
| JHU 02-506 (negative | 0/8 | 0/8 |
| control blood) | | |
| Samples positive for | 2 of 29 | 14 of 29 |
| B. burgdorferi | | |

Samples were unamplified (“neat”) or subjected to amplification (“TGA”).

### CONCLUDING STATEMENTS

[0390] The present invention includes any combination of the various species and subgeneric groupings falling within the generic disclosure. This invention therefore includes the generic description of the invention with a proviso or negative limitation removing any subject matter from the genus, regardless of whether or not the excised material is specifically recited herein.

While in accordance with the patent statutes, description of the various embodiments and examples have been provided, the scope of the invention is not to be limited thereto or thereby. Modifications and alterations of the present invention will be apparent to those skilled in the art without departing from the scope and spirit of the present invention.
The contents of each reference (including, but not limited to, journal articles, U.S. and non-U.S. patents, patent application publications, international patent application publications, gene bank gi or accession numbers, internet web sites, and the like) cited in the present application are incorporated herein by reference in their entirety.

We claim:

1. A method of amplifying a target sequence comprising:
a) contacting a sample with a strand displacing polymerase, a first upstream primer, a second upstream primer, a first downstream primer, and a second downstream primer, wherein said sample is suspected of containing a nucleic acid sequence comprising a target region sequence, wherein said first and second upstream primers are able to hybridize to said nucleic acid sequence upstream of said target region sequence, and wherein said first and second downstream primers are able to hybridize to said nucleic acid sequence downstream of said target region sequence; and
b) treating same sample under conditions such that:
i) a first upstream amplicon is generated comprising said first upstream primer and said target region sequence,
ii) a second upstream amplicon is generated that comprises said second upstream primer, the sequence of said first upstream primer, and said target region sequence, wherein said first upstream amplicon is strand displaced by said strand displacing enzyme during the generation of said second upstream amplicon;
iii) a first downstream amplicon is generated comprising said first downstream primer and said target region sequence, and
iv) a second downstream amplicon is generated that comprises said second downstream primer, the sequence of said first downstream primer, and said target region sequence, wherein said first downstream amplicon is strand displaced by said strand displacing enzyme during the generation of said second downstream amplicon.

2. The method of claim 1, wherein said method further comprises detecting the presence or absence of said first upstream amplicon, said second upstream amplicon, said first downstream amplicon, said second downstream amplicon, or any combination thereof.

3. The method of claim 1, wherein said treating is incubating said sample under isothermal conditions.

4. The method of claim 1, wherein said strand displacing polymerase is selected from the group consisting of Phi 29, Klenow polymerase, and Bst polymerase.

5. The method of claim 1, wherein said strand displacing polymerase is Bst polymerase.

6. The method of claim 1, wherein said sample is selected from the group consisting of a biological sample, an environmental sample, a synthetic sample, and a manufactured sample.

7. The method of claim 1, wherein said sample is a biological sample selected from the group consisting of blood, serum, plasma, tissue, cells, saliva, sputum, urine, cerebrospinal fluid, pleural fluid, milk, tears, stool, sweat, semen, whole cells, cell constituent, cell smear, and extracts thereof.

8. The method of claim 1, wherein said target region sequence is present in a spirochete genome.

9. The method of claim 8, wherein said spirochete is a member of the genus Borrelia.

10. The method of claim 1, wherein said sample is contacted with at least 5 upstream primers and 5 downstream primers.

11. The method of claim 1, wherein said sample is contacted with at least 10 upstream primers and 10 downstream primers.

12. The method of claim 1, wherein the average Tₘ of said primers is in the range of 35-60° C.

13. The method of claim 1, wherein said displaced strand of said first upstream amplicon functions as template for amplification by a downstream primer.

14. The method of claim 1, wherein said displaced strand of said first downstream amplicon functions as template for amplification by an upstream primer.

15. The method of claim 2, wherein said detecting is conducted using a method selected from the group consisting of a PCR method, a mass spectrometry method, and a sequencing method.

16. A kit for use in conducting the method of claim 1, said kit comprising two upstream primers, two downstream primers, and a strand-displacing polymerase.

17. A method of amplifying a target sequence comprising:
a) contacting a sample with a strand displacing polymerase, at least two upstream primers, and at least two downstream primers, wherein said sample is suspected of containing a nucleic acid sequence comprising a target region, wherein said at least two upstream primers hybridize to said nucleic acid sequence upstream of said target region, and wherein said at least two downstream primers hybridize to said nucleic acid sequence downstream of said target region; and
b) treating same sample under conditions such that amplicons are generated from said at least two upstream primer and from said at least two downstream primers.

18. The method of claim 17, wherein said at least two upstream primers comprises at least 5 upstream primers and wherein said at least two downstream primers comprise at least 5 downstream primers.

19. The method of claim 17, wherein said strand displacing polymerase is selected from the group consisting of Phi 29 base, Klenow polymerase, and Bst polymerase.

The application's sequence listing, which the Patent Office published only in electronic form, follows.

SEQUENCE LISTING (2561 sequences)

SEQ ID NO: 1 - DNA, 19 bp, Artificial Sequence
  Description of Artificial Sequence: Synthetic oligonucleotide
  modified_base (10)..(13): a, c, t or g
cgactcgagnnnnatgtgg

SEQ ID NO: 2 - DNA, 13 bp, Artificial Sequence
  Description of Artificial Sequence: Synthetic primer
aaatttrcccggg

SEQ ID NO: 3 - DNA, 13 bp, Artificial Sequence
  Description of Artificial Sequence: Synthetic primer
aaatttacccggg

SEQ ID NO: 4 - DNA, 13 bp, Artificial Sequence
  Description of Artificial Sequence: Synthetic primer
aaatttgcccggg

SEQ ID NO: 5 - DNA, 8 bp, Artificial Sequence
  Description of Artificial Sequence: Synthetic oligonucleotide
aattccgg

SEQ ID NO: 6 - DNA, 5 bp, Artificial Sequence
  Description of Artificial Sequence: Synthetic oligonucleotide
aattc

SEQ ID NO: 7 - DNA, 5 bp, Artificial Sequence
  Description of Artificial Sequence: Synthetic oligonucleotide
attcc

SEQ ID NO: 8 - DNA, 5 bp, Artificial Sequence
  Description of Artificial Sequence: Synthetic oligonucleotide
ttccg

SEQ ID NO: 9 - DNA, 5 bp, Artificial Sequence
  Description of Artificial Sequence: Synthetic oligonucleotide
tccgg

SEQ ID NO: 10 - DNA, 6 bp, Artificial Sequence
  Description of Artificial Sequence: Synthetic oligonucleotide
aattcc

SEQ ID NO: 11 - DNA, 6 bp, Artificial Sequence
  Description of Artificial Sequence: Synthetic oligonucleotide
attccg

SEQ ID NO: 12 - DNA, 6 bp, Artificial Sequence
  Description of Artificial Sequence: Synthetic oligonucleotide
ttccgg

SEQ ID NO: 13 - DNA, 7 bp, Artificial Sequence
  Description of Artificial Sequence: Synthetic oligonucleotide
aattccg

SEQ ID NO: 14 - DNA, 7 bp, Artificial Sequence
  Description of Artificial Sequence: Synthetic oligonucleotide
attccgg

SEQ ID NO: 15 - DNA, 8 bp, Artificial Sequence
  Description of Artificial Sequence: Synthetic oligonucleotide
aaaaaaaa

SEQ ID NO: 16 - DNA, 40 bp, Artificial Sequence
  Description of Artificial Sequence: Synthetic oligonucleotide
aaaaaaaaaattttttttttccccccccccgggggggggg

SEQ ID NO: 17 - DNA, 32 bp, Artificial Sequence
  Description of Artificial Sequence: Synthetic oligonucleotide
aaaaaaaattttttttccccccccgggggggg

SEQ ID NO: 18 - DNA, 20 bp, Artificial Sequence
  Description of Artificial Sequence: Synthetic oligonucleotide
aaaaaaaaaatttttttttt

SEQ ID NO: 19 - DNA, 9 bp, Artificial Sequence
  Description of Artificial Sequence: Synthetic oligonucleotide
ccccccccc

SEQ ID NO: 20 - DNA, 9 bp, Artificial Sequence
  Description of Artificial Sequence: Synthetic oligonucleotide
ggggggggg

SEQ ID NO: 21 - DNA, 10 bp, Artificial Sequence
  Description of Artificial Sequence: Synthetic oligonucleotide
cccccccccc

SEQ ID NO: 22 - DNA, 10 bp, Artificial Sequence
  Description of Artificial Sequence: Synthetic oligonucleotide
cccccccccg

SEQ ID NO: 23 - DNA, 10 bp, Artificial Sequence
  Description of Artificial Sequence: Synthetic oligonucleotide
cggggggggg

SEQ ID NO: 24 - DNA, 10 bp, Artificial Sequence
  Description of Artificial Sequence: Synthetic oligonucleotide
gggggggggg

SEQ ID NO: 25 - DNA, 10 bp, Artificial Sequence
  Description of Artificial Sequence: Synthetic oligonucleotide
tccccccccc

SEQ ID NO: 26 - DNA, 10 bp, Artificial Sequence
  Description of Artificial Sequence: Synthetic oligonucleotide
tttttttttc

SEQ ID NO: 27 - DNA, 11 bp, Artificial Sequence
  Description of Artificial Sequence: Synthetic oligonucleotide
ccccccccccg

SEQ ID NO: 28 - DNA, 11 bp, Artificial Sequence
  Description of Artificial Sequence: Synthetic oligonucleotide
cccccccccgg

SEQ ID NO: 29 - DNA, 11 bp, Artificial Sequence
  Description of Artificial Sequence: Synthetic oligonucleotide
ccggggggggg

SEQ ID NO: 30 - DNA, 11 bp, Artificial Sequence
  Description of Artificial Sequence: Synthetic oligonucleotide
cgggggggggg

SEQ ID NO: 31 - DNA, 11 bp, Artificial Sequence
  Description of Artificial Sequence: Synthetic oligonucleotide
tcccccccccc

SEQ ID NO: 32 - DNA, 11 bp, Artificial Sequence
  Description of Artificial Sequence: Synthetic oligonucleotide
ttccccccccc

SEQ ID NO: 33 - DNA, 11 bp, Artificial Sequence
  Description of Artificial Sequence: Synthetic oligonucleotide
tttttttttcc

SEQ ID NO: 34 - DNA, 11 bp, Artificial Sequence
  Description of Artificial Sequence: Synthetic oligonucleotide
ttttttttttc

SEQ ID NO: 35 - DNA, 12 bp, Artificial Sequence
  Description of Artificial Sequence: Synthetic oligonucleotide
attttttttttc

SEQ ID NO: 36 - DNA, 12 bp, Artificial Sequence
  Description of Artificial Sequence: Synthetic oligonucleotide
ccccccccccgg

SEQ ID NO: 37 - DNA, 12 bp, Artificial Sequence
  Description of Artificial Sequence: Synthetic oligonucleotide
cccccccccggg

SEQ ID NO: 38 - DNA, 12 bp, Artificial Sequence
  Description of Artificial Sequence: Synthetic oligonucleotide
cccggggggggg

SEQ ID NO: 39 - DNA, 12 bp, Artificial Sequence
  Description of Artificial Sequence: Synthetic oligonucleotide
ccgggggggggg

SEQ ID NO: 40 - DNA, 12 bp, Artificial Sequence
  Description of Artificial Sequence: Synthetic oligonucleotide
tccccccccccg

SEQ ID NO: 41 - DNA, 12 bp, Artificial Sequence
  Description of Artificial Sequence: Synthetic oligonucleotide
ttcccccccccc

SEQ ID NO: 42 - DNA, 12 bp, Artificial Sequence
  Description of Artificial Sequence: Synthetic oligonucleotide
tttccccccccc

SEQ ID NO: 43 - DNA, 12 bp, Artificial Sequence
  Description of Artificial Sequence: Synthetic oligonucleotide
tttttttttccc

SEQ ID NO: 44 - DNA, 12 bp, Artificial Sequence
  Description of Artificial Sequence: Synthetic oligonucleotide
ttttttttttcc

SEQ ID NO: 45 - DNA, 8 bp, Artificial Sequence
  Description of Artificial Sequence: Synthetic oligonucleotide
cccccccc

SEQ ID NO: 46 - DNA, 8 bp, Artificial Sequence
  Description of Artificial Sequence: Synthetic oligonucleotide
gggggggg

SEQ ID NO: 47 - DNA, 7 bp, Artificial Sequence
  Description of Artificial Sequence: Synthetic oligonucleotide
ggggggg

SEQ ID NO: 48 - DNA, 6 bp, Artificial Sequence
  Description of Artificial Sequence: Synthetic oligonucleotide
cccccc

SEQ ID NO: 49 - DNA, 6 bp, Artificial Sequence
  Description of Artificial Sequence: Synthetic oligonucleotide
gggggg

SEQ ID NO: 50 - DNA, 6 bp, Artificial Sequence
  Description of Artificial Sequence: Synthetic oligonucleotide
cccccg

SEQ ID NO: 51 - DNA, 6 bp, Artificial Sequence
  Description of Artificial Sequence: Synthetic oligonucleotide
ccccgg

SEQ ID NO: 52 - DNA, 6 bp, Artificial Sequence
  Description of Artificial Sequence: Synthetic oligonucleotide
cccggg

SEQ ID NO: 53 - DNA, 6 bp, Artificial Sequence
  Description of Artificial Sequence: Synthetic oligonucleotide
ccgggg

SEQ ID NO: 54 - DNA, 6 bp, Artificial Sequence
  Description of Artificial Sequence: Synthetic oligonucleotide
cggggg

SEQ ID NO: 55 - DNA, 6 bp, Artificial Sequence
  Description of Artificial Sequence: Synthetic oligonucleotide
tccccc

SEQ ID NO: 56 - DNA, 6 bp, Artificial Sequence
  Description of Artificial Sequence: Synthetic oligonucleotide
ttcccc

SEQ ID NO: 57 - DNA, 6 bp, Artificial Sequence
  Description of Artificial Sequence: Synthetic oligonucleotide
tttccc

SEQ ID NO: 58 - DNA, 6 bp, Artificial Sequence
  Description of Artificial Sequence: Synthetic oligonucleotide
ttttcc

SEQ ID NO: 59 - DNA, 6 bp, Artificial Sequence
  Description of Artificial Sequence: Synthetic oligonucleotide
tttttc

SEQ ID NO: 60 - DNA, 7 bp, Artificial Sequence
  Description of Artificial Sequence: Synthetic oligonucleotide
ccccccg

SEQ ID NO: 61 - DNA, 7 bp, Artificial Sequence
  Description of Artificial Sequence: Synthetic oligonucleotide
cccccgg

SEQ ID NO: 62 - DNA, 7 bp, Artificial Sequence
  Description of Artificial Sequence: Synthetic oligonucleotide
ccccggg

SEQ ID NO: 63 - DNA, 7 bp, Artificial Sequence
  Description of Artificial Sequence: Synthetic oligonucleotide
cccgggg

SEQ ID NO: 64 - DNA, 7 bp, Artificial Sequence
  Description of Artificial Sequence: Synthetic oligonucleotide
ccggggg

SEQ ID NO: 65 - DNA, 7 bp, Artificial Sequence
  Description of Artificial Sequence: Synthetic oligonucleotide
cgggggg

SEQ ID NO: 66 - DNA, 7 bp, Artificial Sequence
  Description of Artificial Sequence: Synthetic oligonucleotide
tcccccc

SEQ ID NO: 67 - DNA, 7 bp, Artificial Sequence
  Description of Artificial Sequence: Synthetic oligonucleotide
ttccccc

SEQ ID NO: 68 - DNA, 7 bp, Artificial Sequence
  Description of Artificial Sequence: Synthetic oligonucleotide
tttcccc

SEQ ID NO: 69 - DNA, 7 bp, Artificial Sequence
  Description of Artificial Sequence: Synthetic oligonucleotide
ttttccc

SEQ ID NO: 70 - DNA, 7 bp, Artificial Sequence
  Description of Artificial Sequence: Synthetic oligonucleotide
tttttcc

SEQ ID NO: 71 - DNA, 7 bp, Artificial Sequence
  Description of Artificial Sequence: Synthetic oligonucleotide
ttttttc

SEQ ID NO: 72 - DNA, 8 bp, Artificial Sequence
  Description of Artificial Sequence: Synthetic oligonucleotide
cccccccg

SEQ ID NO: 73 - DNA, 8 bp, Artificial Sequence
  Description of Artificial Sequence: Synthetic oligonucleotide
ccccccgg

SEQ ID NO: 74 - DNA, 8 bp, Artificial Sequence
  Description of Artificial Sequence: Synthetic oligonucleotide
cccccggg

SEQ ID NO: 75 - DNA, 8 bp, Artificial Sequence
  Description of Artificial Sequence: Synthetic oligonucleotide
ccccgggg

SEQ ID NO: 76 - DNA, 8 bp, Artificial Sequence
  Description of Artificial Sequence: Synthetic oligonucleotide
cccggggg

SEQ ID NO: 77 - DNA, 8 bp, Artificial Sequence
  Description of Artificial Sequence: Synthetic oligonucleotide
ccgggggg

SEQ ID NO: 78 - DNA, 8 bp, Artificial Sequence
  Description of Artificial Sequence: Synthetic oligonucleotide
cggggggg

SEQ ID NO: 79 - DNA, 8 bp, Artificial Sequence
  Description of Artificial Sequence: Synthetic oligonucleotide
tccccccc

SEQ ID NO: 80 - DNA, 8 bp, Artificial Sequence
  Description of Artificial Sequence: Synthetic oligonucleotide
ttcccccc

SEQ ID NO: 81 - DNA, 8 bp, Artificial Sequence
  Description of Artificial Sequence: Synthetic oligonucleotide
tttccccc

SEQ ID NO: 82 - DNA, 8 bp, Artificial Sequence
  Description of Artificial Sequence: Synthetic oligonucleotide
ttttcccc

SEQ ID NO: 83 - DNA, 8 bp, Artificial Sequence
  Description of Artificial Sequence: Synthetic oligonucleotide
tttttccc

SEQ ID NO: 84 - DNA, 8 bp, Artificial Sequence
  Description of Artificial Sequence: Synthetic oligonucleotide
ttttttcc

SEQ ID NO: 85 - DNA, 8 bp, Artificial Sequence
  Description of Artificial Sequence: Synthetic oligonucleotide
tttttttc

SEQ ID NO: 86 - DNA, 9 bp, Artificial Sequence
  Description of Artificial Sequence: Synthetic oligonucleotide
aaaaaaaaa

SEQ ID NO: 87 - DNA, 9 bp, Artificial Sequence
  Description of Artificial Sequence: Synthetic oligonucleotide
ccccccccg

SEQ ID NO: 88 - DNA, 9 bp, Artificial Sequence
  Description of Artificial Sequence: Synthetic oligonucleotide
cccccccgg

SEQ ID NO: 89 - DNA, 9 bp, Artificial Sequence
  Description of Artificial Sequence: Synthetic oligonucleotide
ccccccggg

SEQ ID NO: 90 - DNA, 9 bp, Artificial Sequence
  Description of Artificial Sequence: Synthetic oligonucleotide
cccccgggg

SEQ ID NO: 91 - DNA, 9 bp, Artificial Sequence
  Description of Artificial Sequence: Synthetic oligonucleotide
ccccggggg

SEQ ID NO: 92 - DNA, 9 bp, Artificial Sequence
  Description of Artificial Sequence: Synthetic oligonucleotide
cccgggggg

SEQ ID NO: 93 - DNA, 9 bp, Artificial Sequence
  Description of Artificial Sequence: Synthetic oligonucleotide
ccggggggg

SEQ ID NO: 94 - DNA, 9 bp, Artificial Sequence
  Description of Artificial Sequence: Synthetic oligonucleotide
cgggggggg

SEQ ID NO: 95 - DNA, 9 bp, Artificial Sequence
  Description of Artificial Sequence: Synthetic oligonucleotide
tcccccccc

SEQ ID NO: 96 - DNA, 9 bp, Artificial Sequence
  Description of Artificial Sequence: Synthetic oligonucleotide
ttccccccc

SEQ ID NO: 97 - DNA, 9 bp, Artificial Sequence
  Description of Artificial Sequence: Synthetic oligonucleotide
tttcccccc

SEQ ID NO: 98 - DNA, 9 bp, Artificial Sequence
  Description of Artificial Sequence: Synthetic oligonucleotide
ttttccccc

SEQ ID NO: 99 - DNA, 9 bp, Artificial Sequence
  Description of Artificial Sequence: Synthetic oligonucleotide
tttttcccc

SEQ ID NO: 100 - DNA, 9 bp, Artificial Sequence
  Description of Artificial Sequence: Synthetic oligonucleotide
ttttttccc

SEQ ID NO: 101 - DNA, 9 bp, Artificial Sequence
  Description of Artificial Sequence: Synthetic oligonucleotide
tttttttcc

SEQ ID NO: 102 - DNA, 9 bp, Artificial Sequence
  Description of Artificial Sequence: Synthetic oligonucleotide
ttttttttc

SEQ ID NO: 103 - DNA, 9 bp, Artificial Sequence
  Description of Artificial Sequence: Synthetic oligonucleotide
ttttttttt

SEQ ID NO: 104 - DNA, 10 bp, Artificial Sequence
  Description of Artificial Sequence: Synthetic oligonucleotide
aaaaaaaaaa

SEQ ID NO: 105 - DNA, 10 bp, Artificial Sequence
  Description of Artificial Sequence: Synthetic oligonucleotide
aaaaaaaaat

SEQ ID NO: 106 - DNA, 10 bp, Artificial Sequence
  Description of Artificial Sequence: Synthetic oligonucleotide
attttttttt

SEQ ID NO: 107 - DNA, 10 bp, Artificial Sequence
  Description of Artificial Sequence: Synthetic oligonucleotide
ccccccccgg

SEQ ID NO: 108 - DNA, 10 bp, Artificial Sequence
  Description of Artificial Sequence: Synthetic oligonucleotide
cccccccggg

SEQ ID NO: 109 - DNA, 10 bp, Artificial Sequence
  Description of Artificial Sequence: Synthetic oligonucleotide
ccccccgggg

SEQ ID NO: 110 - DNA, 10 bp, Artificial Sequence
  Description of Artificial Sequence: Synthetic oligonucleotide
cccccggggg

SEQ ID NO: 111 - DNA, 10 bp, Artificial Sequence
  Description of Artificial Sequence: Synthetic oligonucleotide
ccccgggggg

SEQ ID NO: 112 - DNA, 10 bp, Artificial Sequence
  Description of Artificial Sequence: Synthetic oligonucleotide
cccggggggg

SEQ ID NO: 113 - DNA, 10 bp, Artificial Sequence
  Description of Artificial Sequence: Synthetic oligonucleotide
ccgggggggg

SEQ ID NO: 114 - DNA, 10 bp, Artificial Sequence
  Description of Artificial Sequence: Synthetic oligonucleotide
ttcccccccc

SEQ ID NO: 115 - DNA, 10 bp, Artificial Sequence
  Description of Artificial Sequence: Synthetic oligonucleotide
tttccccccc

SEQ ID NO: 116 - DNA, 10 bp, Artificial Sequence
  Description of Artificial Sequence: Synthetic oligonucleotide
ttttcccccc

SEQ ID NO: 117 - DNA, 10 bp, Artificial Sequence
  Description of Artificial Sequence: Synthetic oligonucleotide
tttttccccc

SEQ ID NO: 118 - DNA, 10 bp, Artificial Sequence
  Description of Artificial Sequence: Synthetic oligonucleotide
ttttttcccc

SEQ ID NO: 119 - DNA, 10 bp, Artificial Sequence
  Description of Artificial Sequence: Synthetic oligonucleotide
tttttttccc

SEQ ID NO: 120 - DNA, 10 bp, Artificial Sequence
  Description of Artificial Sequence: Synthetic oligonucleotide
ttttttttcc

SEQ ID NO: 121 - DNA, 10 bp, Artificial Sequence
  Description of Artificial Sequence: Synthetic oligonucleotide
tttttttttt

SEQ ID NO: 122 - DNA, 11 bp, Artificial Sequence
  Description of Artificial Sequence: Synthetic oligonucleotide
aaaaaaaaaat

SEQ ID NO: 123 - DNA, 11 bp, Artificial Sequence
  Description of Artificial Sequence: Synthetic oligonucleotide
aaaaaaaaatt

SEQ ID NO: 124 - DNA, 11 bp, Artificial Sequence
  Description of Artificial Sequence: Synthetic oligonucleotide
aattttttttt

SEQ ID NO: 125 - DNA, 11 bp, Artificial Sequence
  Description of Artificial Sequence: Synthetic oligonucleotide
atttttttttt

SEQ ID NO: 126 - DNA, 11 bp, Artificial Sequence
  Description of Artificial Sequence: Synthetic oligonucleotide
ccccccccggg

SEQ ID NO: 127 - DNA, 11 bp, Artificial Sequence
  Description of Artificial Sequence: Synthetic oligonucleotide
cccccccgggg

SEQ ID NO: 128 - DNA, 11 bp, Artificial Sequence
  Description of Artificial Sequence: Synthetic oligonucleotide
ccccccggggg

SEQ ID NO: 129 - DNA, 11 bp, Artificial Sequence
  Description of Artificial Sequence: Synthetic oligonucleotide
cccccgggggg

SEQ ID NO: 130 - DNA, 11 bp, Artificial Sequence
  Description of Artificial Sequence: Synthetic oligonucleotide
ccccggggggg

SEQ ID NO: 131 - DNA, 11 bp, Artificial Sequence
  Description of Artificial Sequence: Synthetic oligonucleotide
cccgggggggg

SEQ ID NO: 132 - DNA, 11 bp, Artificial Sequence
  Description of Artificial Sequence: Synthetic oligonucleotide
tttcccccccc

SEQ ID NO: 133 - DNA, 11 bp, Artificial Sequence
  Description of Artificial Sequence: Synthetic oligonucleotide
ttttccccccc

SEQ ID NO: 134 - DNA, 11 bp, Artificial Sequence
  Description of Artificial Sequence: Synthetic oligonucleotide
tttttcccccc

SEQ ID NO: 135 - DNA, 11 bp, Artificial Sequence
  Description of Artificial Sequence: Synthetic oligonucleotide
ttttttccccc

SEQ ID NO: 136 - DNA, 11 bp, Artificial Sequence
  Description of Artificial Sequence: Synthetic oligonucleotide
tttttttcccc

SEQ ID NO: 137 - DNA, 11 bp, Artificial Sequence
  Description of Artificial Sequence: Synthetic oligonucleotide
ttttttttccc

SEQ ID NO: 138 - DNA, 12 bp, Artificial Sequence
  Description of Artificial Sequence: Synthetic oligonucleotide
aaaaaaaaaatt

SEQ ID NO: 139 - DNA, 12 bp, Artificial Sequence
  Description of Artificial Sequence: Synthetic oligonucleotide
aaaaaaaaattt

SEQ ID NO: 140 - DNA, 12 bp, Artificial Sequence
  Description of Artificial Sequence: Synthetic oligonucleotide
aaattttttttt

SEQ ID NO: 141 - DNA, 12 bp, Artificial Sequence
  Description of Artificial Sequence: Synthetic oligonucleotide
aatttttttttt

SEQ ID NO: 142 - DNA, 12 bp, Artificial Sequence
  Description of Artificial Sequence: Synthetic oligonucleotide
ccccccccgggg

SEQ ID NO: 143 - DNA, 12 bp, Artificial Sequence
  Description of Artificial Sequence: Synthetic oligonucleotide
cccccccggggg

SEQ ID NO: 144 - DNA, 12 bp, Artificial Sequence
  Description of Artificial Sequence: Synthetic oligonucleotide
ccccccgggggg

SEQ ID NO: 145 - DNA, 12 bp, Artificial Sequence
  Description of Artificial Sequence: Synthetic oligonucleotide
cccccggggggg

SEQ ID NO: 146 - DNA, 12 bp, Artificial Sequence
  Description of Artificial Sequence: Synthetic oligonucleotide
ccccgggggggg

SEQ ID NO: 147 - DNA, 12 bp, Artificial Sequence
  Description of Artificial Sequence: Synthetic oligonucleotide
ttttcccccccc

SEQ ID NO: 148 - DNA, 12 bp, Artificial Sequence
  Description of Artificial Sequence: Synthetic oligonucleotide
tttttccccccc

SEQ ID NO: 149 - DNA, 12 bp, Artificial Sequence
  Description of Artificial Sequence: Synthetic oligonucleotide
ttttttcccccc

SEQ ID NO: 150 - DNA, 12 bp, Artificial Sequence
  Description of Artificial Sequence: Synthetic oligonucleotide
tttttttccccc

SEQ ID NO: 151 - DNA, 12 bp, Artificial Sequence
  Description of Artificial Sequence: Synthetic oligonucleotide
ttttttttcccc

SEQ ID NO: 152 - DNA, 8 bp, Artificial Sequence
  Description of Artificial Sequence: Synthetic oligonucleotide
aaaaaaaa

SEQ ID NO: 153 - DNA, 8 bp, Artificial Sequence
  Description of Artificial Sequence: Synthetic oligonucleotide
tttttttt

SEQ ID NO: 154 - DNA, 7 bp, Artificial Sequence
  Description of Artificial Sequence: Synthetic oligonucleotide
aaaaaaa

SEQ ID NO: 155 - DNA, 7 bp, Artificial Sequence
  Description of Artificial Sequence: Synthetic oligonucleotide
ccccccc

SEQ ID NO: 156 - DNA, 7 bp, Artificial Sequence
  Description of Artificial Sequence: Synthetic oligonucleotide
ttttttt

SEQ ID NO: 157 - DNA, 6 bp, Artificial Sequence
  Description of Artificial Sequence: Synthetic oligonucleotide
aaaaaa

SEQ ID NO: 158 - DNA, 6 bp, Artificial Sequence
  Description of Artificial Sequence: Synthetic oligonucleotide
tttttt

SEQ ID NO: 159 - DNA, 6 bp, Artificial Sequence
  Description of Artificial Sequence: Synthetic oligonucleotide
aaaaat

SEQ ID NO: 160 - DNA, 6 bp, Artificial Sequence
  Description of Artificial Sequence: Synthetic oligonucleotide
aaaatt

SEQ ID NO: 161 - DNA, 6 bp, Artificial Sequence
  Description of Artificial Sequence: Synthetic oligonucleotide
aaattt

SEQ ID NO: 162 - DNA, 6 bp, Artificial Sequence
  Description of Artificial Sequence: Synthetic oligonucleotide
aatttt

SEQ ID NO: 163 - DNA, 6 bp, Artificial Sequence
  Description of Artificial Sequence: Synthetic oligonucleotide
attttt

SEQ ID NO: 164 - DNA, 7 bp, Artificial Sequence
  Description of Artificial Sequence: Synthetic oligonucleotide
aaaaaat

SEQ ID NO: 165 - DNA, 7 bp, Artificial Sequence
  Description of Artificial Sequence: Synthetic oligonucleotide
aaaaatt

SEQ ID NO: 166 - DNA, 7 bp, Artificial Sequence
  Description of Artificial Sequence: Synthetic oligonucleotide
aaaattt

SEQ ID NO: 167 - DNA, 7 bp, Artificial Sequence
  Description of Artificial Sequence: Synthetic oligonucleotide
aaatttt

SEQ ID NO: 168 - DNA, 7 bp, Artificial Sequence
  Description of Artificial Sequence: Synthetic oligonucleotide
aattttt

SEQ ID NO: 169 - DNA, 7 bp, Artificial Sequence
  Description of Artificial Sequence: Synthetic oligonucleotide
atttttt

SEQ ID NO: 170 - DNA, 8 bp, Artificial Sequence
  Description of Artificial Sequence: Synthetic oligonucleotide
aaaaaaat

SEQ ID NO: 171 - DNA, 8 bp, Artificial Sequence
  Description of Artificial Sequence: Synthetic oligonucleotide
aaaaaatt

SEQ ID NO: 172 - DNA, 8 bp, Artificial Sequence
  Description of Artificial Sequence: Synthetic oligonucleotide
aaaaattt

SEQ ID NO: 173 - DNA, 8 bp, Artificial Sequence
  Description of Artificial Sequence: Synthetic oligonucleotide
aaaatttt

SEQ ID NO: 174 - DNA, 8 bp, Artificial Sequence
  Description of Artificial Sequence: Synthetic oligonucleotide
aaattttt

SEQ ID NO: 175 - DNA, 8 bp, Artificial Sequence
  Description of Artificial Sequence: Synthetic oligonucleotide
aatttttt

SEQ ID NO: 176 - DNA, 8 bp, Artificial Sequence
  Description of Artificial Sequence: Synthetic oligonucleotide
attttttt

SEQ ID NO: 177 - DNA, 9 bp, Artificial Sequence
  Description of Artificial Sequence: Synthetic oligonucleotide
aaaaaaaat

SEQ ID NO: 178 - DNA, 9 bp, Artificial Sequence
  Description of Artificial Sequence: Synthetic oligonucleotide
aaaaaaatt

SEQ ID NO: 179 - DNA, 9 bp, Artificial Sequence
  Description of Artificial Sequence: Synthetic oligonucleotide
aaaaaattt

SEQ ID NO: 180 - DNA, 9 bp, Artificial Sequence
  Description of Artificial Sequence: Synthetic oligonucleotide
aaaaatttt

SEQ ID NO: 181 - DNA, 9 bp, Artificial Sequence
  Description of Artificial Sequence: Synthetic oligonucleotide
aaaattttt

SEQ ID NO: 182 - DNA, 9 bp, Artificial Sequence
  Description of Artificial Sequence: Synthetic oligonucleotide
aaatttttt

SEQ ID NO: 183 - DNA, 9 bp, Artificial Sequence
  Description of Artificial Sequence: Synthetic oligonucleotide
aattttttt

SEQ ID NO: 184 - DNA, 9 bp, Artificial Sequence
  Description of Artificial Sequence: Synthetic oligonucleotide
atttttttt

SEQ ID NO: 185 - DNA, 10 bp, Artificial Sequence
  Description of Artificial Sequence: Synthetic oligonucleotide
aaaaaaaatt

SEQ ID NO: 186 - DNA, 10 bp, Artificial Sequence
  Description of Artificial Sequence: Synthetic oligonucleotide
aaaaaaattt

SEQ ID NO: 187 - DNA, 10 bp, Artificial Sequence
  Description of Artificial Sequence: Synthetic oligonucleotide
aaaaaatttt

SEQ ID NO: 188 - DNA, 10 bp, Artificial Sequence
  Description of Artificial Sequence: Synthetic oligonucleotide
aaaaattttt

SEQ ID NO: 189 - DNA, 10 bp, Artificial Sequence
  Description of Artificial Sequence: Synthetic oligonucleotide
aaaatttttt

SEQ ID NO: 190 - DNA, 10 bp, Artificial Sequence
  Description of Artificial Sequence: Synthetic oligonucleotide
aaattttttt

SEQ ID NO: 191 - DNA, 10 bp, Artificial Sequence
  Description of Artificial Sequence: Synthetic oligonucleotide
aatttttttt

SEQ ID NO: 192 - DNA, 11 bp, Artificial Sequence
  Description of Artificial Sequence: Synthetic oligonucleotide
aaaaaaaattt

SEQ ID NO: 193 - DNA, 11 bp, Artificial Sequence
  Description of Artificial Sequence: Synthetic oligonucleotide
aaaaaaatttt

SEQ ID NO: 194 - DNA, 11 bp, Artificial Sequence
  Description of Artificial Sequence: Synthetic oligonucleotide
aaaaaattttt

SEQ ID NO: 195 - DNA, 11 bp, Artificial Sequence
  Description of Artificial Sequence: Synthetic oligonucleotide
aaaaatttttt

SEQ ID NO: 196 - DNA, 11 bp, Artificial Sequence
  Description of Artificial Sequence: Synthetic oligonucleotide
aaaattttttt

SEQ ID NO: 197 - DNA, 11 bp, Artificial Sequence
  Description of Artificial Sequence: Synthetic oligonucleotide
aaatttttttt

SEQ ID NO: 198 - DNA, 12 bp, Artificial Sequence
  Description of Artificial Sequence: Synthetic oligonucleotide
aaaaaaaatttt

SEQ ID NO: 199 - DNA, 12 bp, Artificial Sequence
  Description of Artificial Sequence: Synthetic oligonucleotide
aaaaaaattttt

SEQ ID NO: 200 - DNA, 12 bp, Artificial Sequence
  Description of Artificial Sequence: Synthetic oligonucleotide
aaaaaatttttt

SEQ ID NO: 201 - DNA, 12 bp, Artificial Sequence
  Description of Artificial Sequence: Synthetic oligonucleotide
aaaaattttttt

SEQ ID NO: 202 - DNA, 12 bp, Artificial Sequence
  Description of Artificial Sequence: Synthetic oligonucleotide
aaaatttttttt

SEQ ID NO: 203 - DNA, 10 bp, Artificial Sequence
  Description of Artificial Sequence: Synthetic primer
aaaaaagcgg

SEQ ID NO: 204 - DNA, 8 bp, Artificial Sequence
  Description of Artificial Sequence: Synthetic primer
aaaacgct

SEQ ID NO: 205 - DNA, 12 bp, Artificial Sequence
  Description of Artificial Sequence: Synthetic primer
aaaagaagttat

SEQ ID NO: 206 - DNA, 9 bp, Artificial Sequence
  Description of Artificial Sequence: Synthetic primer
aaaaggcgg

SEQ ID NO: 207 - DNA, 9 bp, Artificial Sequence
  Description of Artificial Sequence: Synthetic primer
aaaccgcca

SEQ ID NO: 208 - DNA, 9 bp, Artificial Sequence
  Description of Artificial Sequence: Synthetic primer
aaaccgtat

SEQ ID NO: 209 - DNA, 9 bp, Artificial Sequence
  Description of Artificial Sequence: Synthetic primer
aaaccgtta

SEQ ID NO: 210 - DNA, 12 bp, Artificial Sequence
  Description of Artificial Sequence: Synthetic primer
aaagaagaagtt

SEQ ID NO: 211 - DNA, 12 bp, Artificial Sequence
  Description of Artificial Sequence: Synthetic primer
aaagaagcttta

SEQ ID NO: 212 - DNA, 12 bp, Artificial Sequence
  Description of Artificial Sequence: Synthetic primer
aaagaagtatta

SEQ ID NO: 213 - DNA, 9 bp, Artificial Sequence
  Description of Artificial Sequence: Synthetic primer
aaagccgat

SEQ ID NO: 214 - DNA, 12 bp, Artificial Sequence
  Description of Artificial Sequence: Synthetic primer
aaagcgtgggga

SEQ ID NO: 215 - DNA, 12 bp, Artificial Sequence
  Description of Artificial Sequence: Synthetic primer
aaagtagaagaa

SEQ ID NO: 216 - DNA, 10 bp, Artificial Sequence
  Description of Artificial Sequence: Synthetic primer
aaataacgat

SEQ ID NO: 217 - DNA, 9 bp, Artificial Sequence
  Description of Artificial Sequence: Synthetic primer
aaatacgct

SEQ ID NO: 218 - DNA, 12 bp, Artificial Sequence
  Description of Artificial Sequence: Synthetic primer
aaatcattaaag

SEQ ID NO: 219 - DNA, 9 bp, Artificial Sequence
  Description of Artificial Sequence: Synthetic primer
aaattagcg

SEQ ID NO: 220 - DNA, 9 bp, Artificial Sequence
  Description of Artificial Sequence: Synthetic primer
aaccgcctt

SEQ ID NO: 221 - DNA, 8 bp, Artificial Sequence
  Description of Artificial Sequence: Synthetic primer
aacgattg

SEQ ID NO: 222 - DNA, 9 bp, Artificial Sequence
  Description of Artificial Sequence: Synthetic primer
aacgatatt

SEQ ID NO: 223 - DNA, 9 bp, Artificial Sequence
  Description of Artificial Sequence: Synthetic primer
aacgcttcw

SEQ ID NO: 224 - DNA, 9 bp, Artificial Sequence
  Description of Artificial Sequence: Synthetic primer
aacgtgaac

SEQ ID NO: 225 - DNA, 12 bp, Artificial Sequence
  Description of Artificial Sequence: Synthetic primer
aacttctttttc

SEQ ID NO: 226 - DNA, 9 bp, Artificial Sequence
  Description of Artificial Sequence: Synthetic primer
aagaaacgc

SEQ ID NO: 227 - DNA, 12 bp, Artificial Sequence
  Description of Artificial Sequence: Synthetic primer
aagarttaaaag

SEQ ID NO: 228 - DNA, 12 bp, Artificial Sequence
  Description of Artificial Sequence: Synthetic primer
aagataaagatg

SEQ ID NO: 229 - DNA, 12 bp, Artificial Sequence
  Description of Artificial Sequence: Synthetic primer
aagatgtaaaag

SEQ ID NO: 230 - DNA, 12 bp, Artificial Sequence
  Description of Artificial Sequence: Synthetic primer
aagcatctaagc

SEQ ID NO: 231 - DNA, 9 bp, Artificial Sequence
  Description of Artificial Sequence: Synthetic primer
aagcgatca

SEQ ID NO: 232 - DNA, 9 bp, Artificial Sequence
  Description of Artificial Sequence: Synthetic primer
aagcggttc

SEQ ID NO: 233 - DNA, 9 bp, Artificial Sequence
  Description of Artificial Sequence: Synthetic primer
aagtaacga

SEQ ID NO: 234 - DNA, 9 bp, Artificial Sequence
  Description of Artificial Sequence: Synthetic primer
aataacgca

SEQ ID NO: 235 - DNA, 12 bp, Artificial Sequence
  Description of Artificial Sequence: Synthetic primer
aatattggacaa

SEQ ID NO: 236 - DNA, 12 bp, Artificial Sequence
  Description of Artificial Sequence: Synthetic primer
aatcattaatat

SEQ ID NO: 237 - DNA, 9 bp, Artificial Sequence
  Description of Artificial Sequence: Synthetic primer
aatccagcg

SEQ ID NO: 238 - DNA, 9 bp, Artificial Sequence
  Description of Artificial Sequence: Synthetic primer
aatcgccca

SEQ ID NO: 239 - DNA, 9 bp, Artificial Sequence
  Description of Artificial Sequence: Synthetic primer
aatcgtatc

SEQ ID NO: 240 - DNA, 9 bp, Artificial Sequence
  Description of Artificial Sequence: Synthetic primer
aatcgttaa

SEQ ID NO: 241 - DNA, 9 bp, Artificial Sequence
  Description of Artificial Sequence: Synthetic primer
aatcgttgc

SEQ ID NO: 242 - DNA, 12 bp, Artificial Sequence
  Description of Artificial Sequence: Synthetic primer
aatctggtggta

SEQ ID NO: 243 - DNA, 8 bp, Artificial Sequence
  Description of Artificial Sequence: Synthetic primer
aatgcggt

SEQ ID NO: 244 - DNA, 8 bp, Artificial Sequence
  Description of Artificial Sequence: Synthetic primer
aattaacg

SEQ ID NO: 245 - DNA, 12 bp, Artificial Sequence
  Description of Artificial Sequence: Synthetic primer
aatttcatctaa

SEQ ID NO: 246 - DNA, 9 bp, Artificial Sequence
  Description of Artificial Sequence: Synthetic primer
accgataat

SEQ ID NO: 247 - DNA, 9 bp, Artificial Sequence
  Description of Artificial Sequence: Synthetic primer
accgcatca

SEQ ID NO: 248 - DNA, 9 bp, Artificial Sequence
  Description of Artificial Sequence: Synthetic primer
acgaatgat

SEQ ID NO: 249 - DNA, 9 bp, Artificial Sequence
  Description of Artificial Sequence: Synthetic primer
acgatgttg

SEQ ID NO: 250 - DNA, 9 bp, Artificial Sequence
  Description of Artificial Sequence: Synthetic primer
acggttatc

SEQ ID NO: 251 - DNA, 9 bp, Artificial Sequence
  Description of Artificial Sequence: Synthetic primer
acggtttta

SEQ ID NO: 252 - DNA, 9 bp, Artificial Sequence
  Description of Artificial Sequence: Synthetic primer
acgrtaaaa

SEQ ID NO: 253 - DNA, 8 bp, Artificial Sequence
  Description of Artificial Sequence: Synthetic primer
acgtttat

SEQ ID NO: 254 - DNA, 12 bp, Artificial Sequence
  Description of Artificial Sequence: Synthetic primer
acttttttatct

SEQ ID NO: 255 - DNA, 12 bp, Artificial Sequence
  Description of Artificial Sequence: Synthetic primer
agaattattaaa

SEQ ID NO: 256 - DNA, 9 bp, Artificial Sequence
  Description of Artificial Sequence: Synthetic primer
agataaacg

SEQ ID NO: 257 - DNA, 12 bp, Artificial Sequence
  Description of Artificial Sequence: Synthetic primer
agatgaaaatgg

SEQ ID NO: 258 - DNA, 9 bp, Artificial Sequence
  Description of Artificial Sequence: Synthetic primer
agcaatcgc

SEQ ID NO: 259 - DNA, 12 bp, Artificial Sequence
  Description of Artificial Sequence: Synthetic primer
agcagttgcagc

SEQ ID NO: 260 - DNA, 9 bp, Artificial Sequence
  Description of Artificial Sequence: Synthetic primer
agcgcaatc

SEQ ID NO: 261 - DNA, 9 bp, Artificial Sequence
  Description of Artificial Sequence: Synthetic primer
agcttgttg

SEQ ID NO: 262 - DNA, 9 bp, Artificial Sequence
  Description of Artificial Sequence: Synthetic primer
agttgatcg

SEQ ID NO: 263 - DNA, 12 bp, Artificial Sequence
  Description of Artificial Sequence: Synthetic primer
ataaaaaaagcg

SEQ ID NO: 264 - DNA, 12 bp, Artificial Sequence
  Description of Artificial Sequence: Synthetic primer
ataaaaaaggta

SEQ ID NO: 265 - DNA, 12 bp, Artificial Sequence
  Description of Artificial Sequence: Synthetic primer
ataaagaagatg

SEQ ID NO: 266 - DNA, 12 bp, Artificial Sequence
  Description of Artificial Sequence: Synthetic primer
ataaagatatta

SEQ ID NO: 267 - DNA, 9 bp, Artificial Sequence
  Description of Artificial Sequence: Synthetic primer
ataacgaag

SEQ ID NO: 268 - DNA, 12 bp, Artificial Sequence
  Description of Artificial Sequence: Synthetic primer
ataactaataaa

SEQ ID NO: 269 - DNA, 12 bp, Artificial Sequence
  Description of Artificial Sequence: Synthetic primer
ataatagaagaa

SEQ ID NO: 270 - DNA, 12 bp, Artificial Sequence
  Description of Artificial Sequence: Synthetic primer
ataccattttta

SEQ ID NO: 271 - DNA, 9 bp, Artificial Sequence
  Description of Artificial Sequence: Synthetic primer
atacgataa

SEQ ID NO: 272 - DNA, 12 bp, Artificial Sequence
  Description of Artificial Sequence: Synthetic primer
atagatgaaaat

SEQ ID NO: 273 - DNA, 9 bp, Artificial Sequence
  Description of Artificial Sequence: Synthetic primer
atagcgata

SEQ ID NO: 274 - DNA, 9 bp, Artificial Sequence
  Description of Artificial Sequence: Synthetic primer
atatcgtaa

SEQ ID NO: 275 - DNA, 12 bp, Artificial Sequence
  Description of Artificial Sequence: Synthetic primer
atatctttttca

SEQ ID NO: 276 - DNA, 10 bp, Artificial Sequence
  Description of Artificial Sequence: Synthetic primer
atattaaagc

SEQ ID NO: 277 - DNA, 12 bp, Artificial Sequence
  Description of Artificial Sequence: Synthetic primer
atattgaagaag

SEQ ID NO: 278 - DNA, 10 bp, Artificial Sequence
  Description of Artificial Sequence: Synthetic primer
atattgatac

SEQ ID NO: 279 - DNA, 9 bp, Artificial Sequence
  Description of Artificial Sequence: Synthetic primer
atcagctac

SEQ ID NO: 280 - DNA, 9 bp, Artificial Sequence
  Description of Artificial Sequence: Synthetic primer
atcatgccg

SEQ ID NO: 281 - DNA, 9 bp, Artificial Sequence
  Description of Artificial Sequence: Synthetic primer
atcgcaccg

SEQ ID NO: 282 - DNA, 10 bp, Artificial Sequence
  Description of Artificial Sequence: Synthetic primer
atcgccttca

SEQ ID NO: 283 - DNA, 9 bp, Artificial Sequence
  Description of Artificial Sequence: Synthetic primer
atcgtaata

SEQ ID NO: 284 - DNA, 9 bp, Artificial Sequence
  Description of Artificial Sequence: Synthetic primer
atcgtgaag

SEQ ID NO: 285 - DNA, 9 bp, Artificial Sequence
  Description of Artificial Sequence: Synthetic primer
atcgttaaa

SEQ ID NO: 286 - DNA, 9 bp, Artificial Sequence
  Description of Artificial Sequence: Synthetic primer
atcttcacg

SEQ ID NO: 287 - DNA, 12 bp, Artificial Sequence
  Description of Artificial Sequence: Synthetic primer
atcttctttaat

SEQ ID NO: 288 - DNA, 9 bp, Artificial Sequence
  Description of Artificial Sequence: Synthetic primer
attaatacc

SEQ ID NO: 289 - DNA, 9 bp, Artificial Sequence
  Description of Artificial Sequence: Synthetic primer
attacaacg

SEQ ID NO: 290 - DNA, 10 bp, Artificial Sequence
  Description of Artificial Sequence: Synthetic primer
attacaacaa

SEQ ID NO: 291 - DNA, 8 bp, Artificial Sequence
  Description of Artificial Sequence: Synthetic primer
attaccgc

SEQ ID NO: 292 - DNA, 12 bp, Artificial Sequence
  Description of Artificial Sequence: Synthetic primer
attagaagaaat

SEQ ID NO: 293 - DNA, 8 bp, Artificial Sequence
  Description of Artificial Sequence: Synthetic primer
attatcgg

SEQ ID NO: 294 - DNA, 9 bp, Artificial Sequence
  Description of Artificial Sequence: Synthetic primer
attatcgta

SEQ ID NO: 295 - DNA, 9 bp, Artificial Sequence
  Description of Artificial Sequence: Synthetic primer
attcatcgg

SEQ ID NO: 296 - DNA, 10 bp, Artificial Sequence
  Description of Artificial Sequence: Synthetic primer
attgatatta

SEQ ID NO: 297 - DNA, 12 bp, Artificial Sequence
  Description of Artificial Sequence: Synthetic primer
attgatataaat

SEQ ID NO: 298 - DNA, 11 bp, Artificial Sequence
  Description of Artificial Sequence: Synthetic primer
attgatgaagc

SEQ ID NO: 299 - DNA, 12 bp, Artificial Sequence
  Description of Artificial Sequence: Synthetic primer
attgatgattta

SEQ ID NO: 300 - DNA, 10 bp, Artificial Sequence
  Description of Artificial Sequence: Synthetic primer
attgcagcaa

SEQ ID NO: 301 - DNA, 12 bp, Artificial Sequence
  Description of Artificial Sequence: Synthetic primer
atttagataaat

SEQ ID NO: 302 - DNA, 12 bp, Artificial Sequence
  Description of Artificial Sequence: Synthetic primer
atttagatgaag

SEQ ID NO: 303 - DNA, 10 bp, Artificial Sequence
  Description of Artificial Sequence: Synthetic primer
atttatcagc

SEQ ID NO: 304 - DNA, 12 bp, Artificial Sequence
  Description of Artificial Sequence: Synthetic primer
atttattattag

SEQ ID NO: 305 - DNA, 12 bp, Artificial Sequence
  Description of Artificial Sequence: Synthetic primer
atttctttatca

SEQ ID NO: 306 - DNA, 9 bp, Artificial Sequence
  Description of Artificial Sequence: Synthetic primer
caatcggtg

SEQ ID NO: 307 - DNA, 9 bp, Artificial Sequence
  Description of Artificial Sequence: Synthetic primer
caatcgyta

SEQ ID NO: 308 - DNA, 12 bp, Artificial Sequence
  Description of Artificial Sequence: Synthetic primer
caccttttttaa

SEQ ID NO: 309 - DNA, 9 bp, Artificial Sequence
  Description of Artificial Sequence: Synthetic primer
cagcgatta

SEQ ID NO: 310 - DNA, 11 bp, Artificial Sequence
  Description of Artificial Sequence: Synthetic primer
cagctttttta

SEQ ID NO: 311 - DNA, 9 bp, Artificial Sequence
  Description of Artificial Sequence: Synthetic primer
catcgcttc

SEQ ID NO: 312 - DNA, 12 bp, Artificial Sequence
  Description of Artificial Sequence: Synthetic primer
catctaaaataa

SEQ ID NO: 313 - DNA, 9 bp, Artificial Sequence
  Description of Artificial Sequence: Synthetic primer
catcttccg

SEQ ID NO: 314 - DNA, 9 bp, Artificial Sequence
  Description of Artificial Sequence: Synthetic primer
ccaatcggc

SEQ ID NO: 315 - DNA, 9 bp, Artificial Sequence
  Description of Artificial Sequence: Synthetic primer
cccgcttca

SEQ ID NO: 316 - DNA, 9 bp, Artificial Sequence
  Description of Artificial Sequence: Synthetic primer
ccggtaata

SEQ ID NO: 317 - DNA, 9 bp, Artificial Sequence
  Description of Artificial Sequence: Synthetic primer
cgataatga

SEQ ID NO: 318 - DNA, 9 bp, Artificial Sequence
  Description of Artificial Sequence: Synthetic primer
cgattaaag

SEQ ID NO: 319 - DNA, 8 bp, Artificial Sequence
  Description of Artificial Sequence: Synthetic primer
cgattgcg

SEQ ID NO: 320 - DNA, 9 bp, Artificial Sequence
  Description of Artificial Sequence: Synthetic primer
cgcctcttc

SEQ ID NO: 321 - DNA, 9 bp, Artificial Sequence
  Description of Artificial Sequence: Synthetic primer
cgctaaata

SEQ ID NO: 322 - DNA, 9 bp, Artificial Sequence
  Description of Artificial Sequence: Synthetic primer
cgctttata

SEQ ID NO: 323 - DNA, 12 bp, Artificial Sequence
  Description of Artificial Sequence: Synthetic primer
cggcgcgctgaa

SEQ ID NO: 324 - DNA, 9 bp, Artificial Sequence
  Description of Artificial Sequence: Synthetic primer
cggtattga

SEQ ID NO: 325 - DNA, 9 bp, Artificial Sequence
  Description of Artificial Sequence: Synthetic primer
cgtaaagaa

SEQ ID NO: 326 - DNA, 9 bp, Artificial Sequence
  Description of Artificial Sequence: Synthetic primer
cgtaaatac

SEQ ID NO: 327 - DNA, 9 bp, Artificial Sequence
  Description of Artificial Sequence: Synthetic primer
cgtgatcaa

SEQ ID NO: 328 - DNA, 9 bp, Artificial Sequence
  Description of Artificial Sequence: Synthetic primer
cgtttatta

SEQ ID NO: 329 - DNA, 9 bp, Artificial Sequence
  Description of Artificial Sequence: Synthetic primer
cgwtaataa

SEQ ID NO: 330 - DNA, 12 bp, Artificial Sequence
  Description of Artificial Sequence: Synthetic primer
ctaattcttcta

SEQ ID NO: 331 - DNA, 12 bp, Artificial Sequence
  Description of Artificial Sequence: Synthetic primer
ctactttttcca

SEQ ID NO: 332 - DNA, 12 bp, Artificial Sequence
  Description of Artificial Sequence: Synthetic primer
ctgtagaagaag

SEQ ID NO: 333 - DNA, 12 bp, Artificial Sequence
  Description of Artificial Sequence: Synthetic primer
ctgttttagaag

SEQ ID NO: 334 - DNA, 9 bp, Artificial Sequence
  Description of Artificial Sequence: Synthetic primer
cttcacgaa

SEQ ID NO: 335 - DNA, 10 bp, Artificial Sequence
  Description of Artificial Sequence: Synthetic primer
cttcatcaac

SEQ ID NO: 336 - DNA, 12 bp, Artificial Sequence
  Description of Artificial Sequence: Synthetic primer
cttcatctaata

SEQ ID NO: 337 - DNA, 12 bp, Artificial Sequence
  Description of Artificial Sequence: Synthetic primer
cttcttctaaaa

SEQ ID NO: 338 - DNA, 12 bp, Artificial Sequence
  Description of Artificial Sequence: Synthetic primer
cttcttctttaa

SEQ ID NO: 339 - DNA, 10 bp, Artificial Sequence
  Description of Artificial Sequence: Synthetic primer
cttctttcgc

SEQ ID NO: 340 - DNA, 12 bp, Artificial Sequence
  Description of Artificial Sequence: Synthetic primer
ctttagaaaata

SEQ ID NO: 341 - DNA, 12 bp, Artificial Sequence
  Description of Artificial Sequence: Synthetic primer
ctttatataaar

SEQ ID NO: 342 - DNA, 12 bp, Artificial Sequence
  Description of Artificial Sequence: Synthetic primer
ctttatcaataa

SEQ ID NO: 343 - DNA, 10 bp, Artificial Sequence
  Description of Artificial Sequence: Synthetic primer
ctttcgcttc

SEQ ID NO: 344 - DNA, 12 bp, Artificial Sequence
  Description of Artificial Sequence: Synthetic primer
cttttatataaa

SEQ ID NO: 345 - DNA, 12 bp, Artificial Sequence
  Description of Artificial Sequence: Synthetic primer
ctttttcwtcta

SEQ ID NO: 346 - DNA, 12 bp, Artificial Sequence
  Description of Artificial Sequence: Synthetic primer
gaaaaaggatta

SEQ ID NO: 347 - DNA, 9 bp, Artificial Sequence
  Description of Artificial Sequence: Synthetic primer
gaaacgatc

SEQ ID NO: 348 - DNA, 9 bp, Artificial Sequence
  Description of Artificial Sequence: Synthetic primer
gaaacgtta

SEQ ID NO: 349 - DNA, 12 bp, Artificial Sequence
  Description of Artificial Sequence: Synthetic primer
gaaattgctgac

SEQ ID NO: 350 - DNA, 12 bp, Artificial Sequence
  Description of Artificial Sequence: Synthetic primer
gaagaagygaaa

SEQ ID NO: 351 - DNA, 12 bp, Artificial Sequence
  Description of Artificial Sequence: Synthetic primer
gaagatgaaaaa

SEQ ID NO: 352 - DNA, 12 bp, Artificial Sequence
  Description of Artificial Sequence: Synthetic primer
gaagatttatta

SEQ ID NO: 353 - DNA, 12 bp, Artificial Sequence
  Description of Artificial Sequence: Synthetic primer
gaagtattaaaa

SEQ ID NO: 354 - DNA, 12 bp, Artificial Sequence
  Description of Artificial Sequence: Synthetic primer
gaatatgaagaa

SEQ ID NO: 355 - DNA, 12 bp, Artificial Sequence
  Description of Artificial Sequence: Synthetic primer
gatattgataaa

SEQ ID NO: 356 - DNA, 12 bp, Artificial Sequence
  Description of Artificial Sequence: Synthetic primer
gatgaagataaa

SEQ ID NO: 357 - DNA, 12 bp, Artificial Sequence
  Description of Artificial Sequence: Synthetic primer
gatttattatta

SEQ ID NO: 358 - DNA, 12 bp, Artificial Sequence
  Description of Artificial Sequence: Synthetic primer
gatttcacgaaa

SEQ ID NO: 359 - DNA, 8 bp, Artificial Sequence
  Description of Artificial Sequence: Synthetic primer
gcaataac

SEQ ID NO: 360 - DNA, 8 bp, Artificial Sequence
  Description of Artificial Sequence: Synthetic primer
gcctttac

SEQ ID NO: 361 - DNA, 9 bp, Artificial Sequence
  Description of Artificial Sequence: Synthetic primer
gcgaaagaa

SEQ ID NO: 362 - DNA, 9 bp, Artificial Sequence
  Description of Artificial Sequence: Synthetic primer
gcgatttta

SEQ ID NO: 363 - DNA, 9 bp, Artificial Sequence
  Description of Artificial Sequence: Synthetic primer
gcggtatta

SEQ ID NO: 364 - DNA, 9 bp, Artificial Sequence
  Description of Artificial Sequence: Synthetic primer
gcgttaata

SEQ ID NO: 365 - DNA, 9 bp, Artificial Sequence
  Description of Artificial Sequence: Synthetic primer
gcgtttaaa

SEQ ID NO: 366 - DNA, 9 bp, Artificial Sequence
  Description of Artificial Sequence: Synthetic primer
gcgttttga

SEQ ID NO: 367 - DNA, 9 bp, Artificial Sequence
  Description of Artificial Sequence: Synthetic primer
gckgattta

SEQ ID NO: 368 - DNA, 12 bp, Artificial Sequence
  Description of Artificial Sequence: Synthetic primer
gctaaaaaagaa

SEQ ID NO: 369 - DNA, 12 bp, Artificial Sequence
  Description of Artificial Sequence: Synthetic primer
gctattttatta

SEQ ID NO: 370 - DNA, 12 bp, Artificial Sequence
  Description of Artificial Sequence: Synthetic primer
gctcgcgcgaca

SEQ ID NO: 371 - DNA, 12 bp, Artificial Sequence
  Description of Artificial Sequence: Synthetic primer
gcttcttttata

SEQ ID NO: 372 - DNA, 12 bp, Artificial Sequence
  Description of Artificial Sequence: Synthetic primer
gctttttcatca

SEQ ID NO: 373 - DNA, 8 bp, Artificial Sequence
  Description of Artificial Sequence: Synthetic primer
ggcattac

SEQ ID NO: 374 - DNA, 9 bp, Artificial Sequence
  Description of Artificial Sequence: Synthetic primer
ggcggtaaa

SEQ ID NO: 375 - DNA, 9 bp, Artificial Sequence
  Description of Artificial Sequence: Synthetic primer
ggttgaaac

SEQ ID NO: 376 - DNA, 8 bp, Artificial Sequence
  Description of Artificial Sequence: Synthetic primer
ggtttaac

SEQ ID NO: 377 - DNA, 9 bp, Artificial Sequence
  Description of Artificial Sequence: Synthetic primer
gtaaaacga

SEQ ID NO: 378 - DNA, 12 bp, Artificial Sequence
  Description of Artificial Sequence: Synthetic primer
gtaaagctttca

SEQ ID NO: 379 - DNA, 9 bp, Artificial Sequence
  Description of Artificial Sequence: Synthetic primer
gtgacgaaa

SEQ ID NO: 380 - DNA, 9 bp, Artificial Sequence
  Description of Artificial Sequence: Synthetic primer
gttatcgca

SEQ ID NO: 381 - DNA, 12 bp, Artificial Sequence
  Description of Artificial Sequence: Synthetic primer
gttgttttacca

SEQ ID NO: 382 - DNA, 9 bp, Artificial Sequence
  Description of Artificial Sequence: Synthetic primer
sttccgcaa

SEQ ID NO: 383 - DNA, 12 bp, Artificial Sequence
  Description of Artificial Sequence: Synthetic primer
taaaatgggtga

SEQ ID NO: 384 - DNA, 12 bp, Artificial Sequence
  Description of Artificial Sequence: Synthetic primer
taaagcaattaa

SEQ ID NO: 385 - DNA, 12 bp, Artificial Sequence
  Description of Artificial Sequence: Synthetic primer
taaatcatctaa

SEQ ID NO: 386 - DNA, 9 bp, Artificial Sequence
  Description of Artificial Sequence: Synthetic primer
taacgaaga

SEQ ID NO: 387 - DNA, 12 bp, Artificial Sequence
  Description of Artificial Sequence: Synthetic primer
taactcttctaa

SEQ ID NO: 388 - DNA, 10 bp, Artificial Sequence
  Description of Artificial Sequence: Synthetic primer
taatgcttca

SEQ ID NO: 389 - DNA, 10 bp, Artificial Sequence
  Description of Artificial Sequence: Synthetic primer
tacatcatca

SEQ ID NO: 390 - DNA, 9 bp, Artificial Sequence
  Description of Artificial Sequence: Synthetic primer
tatcatcga

SEQ ID NO: 391 - DNA, 12 bp, Artificial Sequence
  Description of Artificial Sequence: Synthetic primer
tatcattaataa

SEQ ID NO: 392 - DNA, 12 bp, Artificial Sequence
  Description of Artificial Sequence: Synthetic primer
tatcctcttcca

SEQ ID NO: 393 - DNA, 12 bp, Artificial Sequence
  Description of Artificial Sequence: Synthetic primer
tcttctaataaa

SEQ ID NO: 394 - DNA, 12 bp, Artificial Sequence
  Description of Artificial Sequence: Synthetic primer
tcttctaattca

SEQ ID NO: 395 - DNA, 12 bp, Artificial Sequence
  Description of Artificial Sequence: Synthetic primer
tcttcttctaaa

SEQ ID NO: 396 - DNA, 12 bp, Artificial Sequence
  Description of Artificial Sequence: Synthetic primer
tctttttttaca

SEQ ID NO: 397 - DNA, 9 bp, Artificial Sequence
  Description of Artificial Sequence: Synthetic primer
tgacgataa

SEQ ID NO: 398 - DNA, 9 bp, Artificial Sequence
  Description of Artificial Sequence: Synthetic primer
tgatgcgaa

SEQ ID NO: 399 - DNA, 12 bp, Artificial Sequence
  Description of Artificial Sequence: Synthetic primer
tgcttcttttaa

SEQ ID NO: 400 - DNA, 12 bp, Artificial Sequence
  Description of Artificial Sequence: Synthetic primer
ttagatgaagaa

SEQ ID NO: 401 - DNA, 12 bp, Artificial Sequence
  Description of Artificial Sequence: Synthetic primer
ttagctaaagaa

SEQ ID NO: 402 - DNA, 12 bp, Artificial Sequence
  Description of Artificial Sequence: Synthetic primer
ttattagaagaa

SEQ ID NO: 403 - DNA, 10 bp, Artificial Sequence
  Description of Artificial Sequence: Synthetic primer
aaaacaattg

SEQ ID NO: 404 - DNA, 10 bp, Artificial Sequence
  Description of Artificial Sequence: Synthetic primer
aaaacgttta

SEQ ID NO: 405 - DNA, 10 bp, Artificial Sequence
  Description of Artificial Sequence: Synthetic primer
aaaagaatta

SEQ ID NO: 406 - DNA, 10 bp, Artificial Sequence
  Description of Artificial Sequence: Synthetic primer
aaaaggtatt

SEQ ID NO: 407 - DNA, 10 bp, Artificial Sequence
  Description of Artificial Sequence: Synthetic primer
aaaaggtgaa

SEQ ID NO: 408 - DNA, 10 bp, Artificial Sequence
  Description of Artificial Sequence: Synthetic primer
aaataacgat

SEQ ID NO: 409 - DNA, 12 bp, Artificial Sequence
  Description of Artificial Sequence: Synthetic primer
aaatcgttgata

SEQ ID NO: 410 - DNA, 11 bp, Artificial Sequence
  Description of Artificial Sequence: Synthetic primer
aaatggtgaag

SEQ ID NO: 411 - DNA, 10 bp, Artificial Sequence
  Description of Artificial Sequence: Synthetic primer
aacaccaatt

SEQ ID NO: 412 - DNA, 10 bp, Artificial Sequence
  Description of Artificial Sequence: Synthetic primer
aacgaaagat

SEQ ID NO: 413 - DNA, 12 bp, Artificial Sequence
  Description of Artificial Sequence: Synthetic primer
aacgaaagaaga

SEQ ID NO: 414 - DNA, 9 bp, Artificial Sequence
  Description of Artificial Sequence: Synthetic primer
aacgaataa

SEQ ID NO: 415 - DNA, 11 bp, Artificial Sequence
  Description of Artificial Sequence: Synthetic primer
aagaagcgaag

SEQ ID NO: 416 - DNA, 12 bp, Artificial Sequence
  Description of Artificial Sequence: Synthetic primer
aagaagtaaaag

SEQ ID NO: 417 - DNA, 7 bp, Artificial Sequence
  Description of Artificial Sequence: Synthetic primer
aagcgga

SEQ ID NO: 418 - DNA, 8 bp, Artificial Sequence
  Description of Artificial Sequence: Synthetic primer
aatcgcta

SEQ ID NO: 419 - DNA, 10 bp, Artificial Sequence
  Description of Artificial Sequence: Synthetic primer
aatcgcaatt

SEQ ID NO: 420 - DNA, 12 bp, Artificial Sequence
  Description of Artificial Sequence: Synthetic primer
aatcgcygatat

SEQ ID NO: 421 - DNA, 10 bp, Artificial Sequence
  Description of Artificial Sequence: Synthetic primer
aatcgtttca

SEQ ID NO: 422 - DNA, 9 bp, Artificial Sequence
  Description of Artificial Sequence: Synthetic primer
acaacgatt

SEQ ID NO: 423 - DNA, 10 bp, Artificial Sequence
  Description of Artificial Sequence: Synthetic primer
accgataata

SEQ ID NO: 424 - DNA, 9 bp, Artificial Sequence
  Description of Artificial Sequence: Synthetic primer
acgaagcaa

SEQ ID NO: 425 - DNA, 11 bp, Artificial Sequence
  Description of Artificial Sequence: Synthetic primer
agaagcgatga

SEQ ID NO: 426 - DNA, 11 bp, Artificial Sequence
  Description of Artificial Sequence: Synthetic primer
agcgaaagaag

SEQ ID NO: 427 - DNA, 8 bp, Artificial Sequence
  Description of Artificial Sequence: Synthetic primer
atacgatg

SEQ ID NO: 428 - DNA, 8 bp, Artificial Sequence
  Description of Artificial Sequence: Synthetic primer
atacggaa

SEQ ID NO: 429 - DNA, 10 bp, Artificial Sequence
  Description of Artificial Sequence: Synthetic primer
atataaaaga

SEQ ID NO: 430 - DNA, 7 bp, Artificial Sequence
  Description of Artificial Sequence: Synthetic primer
atatgcg

SEQ ID NO: 431 - DNA, 10 bp, Artificial Sequence
  Description of Artificial Sequence: Synthetic primer
atattatcgt

SEQ ID NO: 432 - DNA, 12 bp, Artificial Sequence
  Description of Artificial Sequence: Synthetic primer
atcarcgatttt

SEQ ID NO: 433 - DNA, 8 bp, Artificial Sequence
  Description of Artificial Sequence: Synthetic primer
atcatacg

SEQ ID NO: 434 - DNA, 8 bp, Artificial Sequence
  Description of Artificial Sequence: Synthetic primer
atccgtta

SEQ ID NO: 435 - DNA, 8 bp, Artificial Sequence
  Description of Artificial Sequence: Synthetic primer
atgaagcg

SEQ ID NO: 436 - DNA, 9 bp, Artificial Sequence
  Description of Artificial Sequence: Synthetic primer
atgtaacga

SEQ ID NO: 437 - DNA, 11 bp, Artificial Sequence
  Description of Artificial Sequence: Synthetic primer
attaaagatgg

SEQ ID NO: 438 - DNA, 8 bp, Artificial Sequence
  Description of Artificial Sequence: Synthetic primer
attaacgc

SEQ ID NO: 439 - DNA, 10 bp, Artificial Sequence
  Description of Artificial Sequence: Synthetic primer
attacaaaag

SEQ ID NO: 440 - DNA, 10 bp, Artificial Sequence
  Description of Artificial Sequence: Synthetic primer
attacgataa

SEQ ID NO: 441 - DNA, 9 bp, Artificial Sequence
  Description of Artificial Sequence: Synthetic primer
attacgtta

SEQ ID NO: 442 - DNA, 10 bp, Artificial Sequence
  Description of Artificial Sequence: Synthetic primer
attacttgta

SEQ ID NO: 443 - DNA, 10 bp, Artificial Sequence
  Description of Artificial Sequence: Synthetic primer
attatatgaa

SEQ ID NO: 444 - DNA, 10 bp, Artificial Sequence
  Description of Artificial Sequence: Synthetic primer
attattatcg

SEQ ID NO: 445 - DNA, 12 bp, Artificial Sequence
  Description of Artificial Sequence: Synthetic primer
attgaaaaagca

SEQ ID NO: 446 - DNA, 10 bp, Artificial Sequence
  Description of Artificial Sequence: Synthetic primer
attgaaacga

SEQ ID NO: 447 - DNA, 10 bp, Artificial Sequence
  Description of Artificial Sequence: Synthetic primer
attgcttctt

SEQ ID NO: 448 - DNA, 9 bp, Artificial Sequence
  Description of Artificial Sequence: Synthetic primer
attgtcgtt

SEQ ID NO: 449 - DNA, 10 bp, Artificial Sequence
  Description of Artificial Sequence: Synthetic primer
atttatcgta

SEQ ID NO: 450 - DNA, 10 bp, Artificial Sequence
  Description of Artificial Sequence: Synthetic primer
caacttcttt

SEQ ID NO: 451 - DNA, 9 bp, Artificial Sequence
  Description of Artificial Sequence: Synthetic primer
caatcgtat

SEQ ID NO: 452 - DNA, 10 bp, Artificial Sequence
  Description of Artificial Sequence: Synthetic primer
caattaatac

SEQ ID NO: 453 - DNA, 10 bp, Artificial Sequence
  Description of Artificial Sequence: Synthetic primer
caattggaat

SEQ ID NO: 454 - DNA, 10 bp, Artificial Sequence
  Description of Artificial Sequence: Synthetic primer
caccaattac

SEQ ID NO: 455 - DNA, 10 bp, Artificial Sequence
  Description of Artificial Sequence: Synthetic primer
caccaattgt

SEQ ID NO: 456 - DNA, 11 bp, Artificial Sequence
  Description of Artificial Sequence: Synthetic primer
caccttttaca

SEQ ID NO: 457 - DNA, 8 bp, Artificial Sequence
  Description of Artificial Sequence: Synthetic primer
catacgaa

SEQ ID NO: 458 - DNA, 9 bp, Artificial Sequence
  Description of Artificial Sequence: Synthetic primer
catataacg

SEQ ID NO: 459 - DNA, 11 bp, Artificial Sequence
  Description of Artificial Sequence: Synthetic primer
catcaattgtt

SEQ ID NO: 460 - DNA, 7 bp, Artificial Sequence
  Description of Artificial Sequence: Synthetic primer
ccgcttt

SEQ ID NO: 461 - DNA, 12 bp, Artificial Sequence
  Description of Artificial Sequence: Synthetic primer
cgacttaccgac

SEQ ID NO: 462 - DNA, 7 bp, Artificial Sequence
  Description of Artificial Sequence: Synthetic primer
cgataac

SEQ ID NO: 463 - DNA, 10 bp, Artificial Sequence
  Description of Artificial Sequence: Synthetic primer
cgataaagaa

SEQ ID NO: 464 - DNA, 11 bp, Artificial Sequence
  Description of Artificial Sequence: Synthetic primer
cgatataattt

SEQ ID NO: 465 - DNA, 7 bp, Artificial Sequence
  Description of Artificial Sequence: Synthetic primer
cgatgta

SEQ ID NO: 466 - DNA, 9 bp, Artificial Sequence
  Description of Artificial Sequence: Synthetic primer
cgattgaag

SEQ ID NO: 467 - DNA, 11 bp, Artificial Sequence
  Description of Artificial Sequence: Synthetic primer
cgatttttcaa

SEQ ID NO: 468 - DNA, 7 bp, Artificial Sequence
  Description of Artificial Sequence: Synthetic primer
cgcaata

SEQ ID NO: 469 - DNA, 11 bp, Artificial Sequence
  Description of Artificial Sequence: Synthetic primer
cgctttttatt

SEQ ID NO: 470 - DNA, 7 bp, Artificial Sequence
  Description of Artificial Sequence: Synthetic primer
cggatat

SEQ ID NO: 471 - DNA, 8 bp, Artificial Sequence
  Description of Artificial Sequence: Synthetic primer
cggtaaat

SEQ ID NO: 472 - DNA, 9 bp, Artificial Sequence
  Description of Artificial Sequence: Synthetic primer
cggtttaat

SEQ ID NO: 473 - DNA, 8 bp, Artificial Sequence
  Description of Artificial Sequence: Synthetic primer
cgtaatat

SEQ ID NO: 474 - DNA, 8 bp, Artificial Sequence
  Description of Artificial Sequence: Synthetic primer
cgtataac

SEQ ID NO: 475 - DNA, 9 bp, Artificial Sequence
  Description of Artificial Sequence: Synthetic primer
cgttaattg

SEQ ID NO: 476 - DNA, 9 bp, Artificial Sequence
  Description of Artificial Sequence: Synthetic primer
cgttatgaa

SEQ ID NO: 477 - DNA, 8 bp, Artificial Sequence
  Description of Artificial Sequence: Synthetic primer
ctatcgta

SEQ ID NO: 478 - DNA, 12 bp, Artificial Sequence
  Description of Artificial Sequence: Synthetic primer
ctgattaaagtt

SEQ ID NO: 479 - DNA, 10 bp, Artificial Sequence
  Description of Artificial Sequence: Synthetic primer
cttccataat

SEQ ID NO: 480 - DNA, 8 bp, Artificial Sequence
  Description of Artificial Sequence: Synthetic primer
cttcgtaa

SEQ ID NO: 481 - DNA, 10 bp, Artificial Sequence
  Description of Artificial Sequence: Synthetic primer
cttctatata

SEQ ID NO: 482 - DNA, 10 bp, Artificial Sequence
  Description of Artificial Sequence: Synthetic primer
cttctgcaat

SEQ ID NO: 483 - DNA, 10 bp, Artificial Sequence
  Description of Artificial Sequence: Synthetic primer
cttcttcacg

SEQ ID NO: 484 - DNA, 12 bp, Artificial Sequence
  Description of Artificial Sequence: Synthetic primer
cttcttctttcg

SEQ ID NO: 485 - DNA, 10 bp, Artificial Sequence
  Description of Artificial Sequence: Synthetic primer
cttctttaat

SEQ ID NO: 486 - DNA, 10 bp, Artificial Sequence
  Description of Artificial Sequence: Synthetic primer
cttctttcgc

SEQ ID NO: 487 - DNA, 11 bp, Artificial Sequence
  Description of Artificial Sequence: Synthetic primer
cttctttcgga

SEQ ID NO: 488 - DNA, 10 bp, Artificial Sequence
  Description of Artificial Sequence: Synthetic primer
ctttcgcttt

SEQ ID NO: 489 - DNA, 12 bp, Artificial Sequence
  Description of Artificial Sequence: Synthetic primer
ctttcgcttctt

SEQ ID NO: 490 - DNA, 12 bp, Artificial Sequence
  Description of Artificial Sequence: Synthetic primer
cttttaattctt

SEQ ID NO: 491 - DNA, 11 bp, Artificial Sequence
  Description of Artificial Sequence: Synthetic primer
cttttgtaata

SEQ ID NO: 492 - DNA, 10 bp, Artificial Sequence
  Description of Artificial Sequence: Synthetic primer
ctttttcgta

SEQ ID NO: 493 - DNA, 10 bp, Artificial Sequence
  Description of Artificial Sequence: Synthetic primer
cttttttcat

SEQ ID NO: 494 - DNA, 10 bp, Artificial Sequence
  Description of Artificial Sequence: Synthetic primer
ctttttyatc

SEQ ID NO: 495 - DNA, 10 bp, Artificial Sequence
  Description of Artificial Sequence: Synthetic primer
gaaacgattg

SEQ ID NO: 496 - DNA, 12 bp, Artificial Sequence
  Description of Artificial Sequence: Synthetic primer
gaagaagcgaaa

SEQ ID NO: 497 - DNA, 10 bp, Artificial Sequence
  Description of Artificial Sequence: Synthetic primer
gaagaagtaa

SEQ ID NO: 498 - DNA, 11 bp, Artificial Sequence
  Description of Artificial Sequence: Synthetic primer
gaagaagtagc

SEQ ID NO: 499 - DNA, 10 bp, Artificial Sequence
  Description of Artificial Sequence: Synthetic primer
gatacgaaag

SEQ ID NO: 500 - DNA, 10 bp, Artificial Sequence
  Description of Artificial Sequence: Synthetic primer
gatgaattag

SEQ ID NO: 501 - DNA, 7 bp, Artificial Sequence
  Description of Artificial Sequence: Synthetic primer
gattacg

SEQ ID NO: 502 - DNA, 12 bp, Artificial Sequence
  Description of Artificial Sequence: Synthetic primer
gattaaagtttc

SEQ ID NO: 503 - DNA, 12 bp, Artificial Sequence
  Description of Artificial Sequence: Synthetic primer
gcaattgaaaaa

SEQ ID NO: 504 - DNA, 10 bp, Artificial Sequence
  Description of Artificial Sequence: Synthetic primer
gcaattgtat

SEQ ID NO: 505 - DNA, 10 bp, Artificial Sequence
  Description of Artificial Sequence: Synthetic primer
gcaattgttg

SEQ ID NO: 506 - DNA, 11 bp, Artificial Sequence
  Description of Artificial Sequence: Synthetic primer
gcgaaagaagc

SEQ ID NO: 507 - DNA, 8 bp, Artificial Sequence
  Description of Artificial Sequence: Synthetic primer
gcgtaata

SEQ ID NO: 508 - DNA, 10 bp, Artificial Sequence
  Description of Artificial Sequence: Synthetic primer
gctactttat

SEQ ID NO: 509 - DNA, 10 bp, Artificial Sequence
  Description of Artificial Sequence: Synthetic primer
gcttctttcg

SEQ ID NO: 510 - DNA, 12 bp, Artificial Sequence
  Description of Artificial Sequence: Synthetic primer
gctttttttatt

SEQ ID NO: 511 - DNA, 11 bp, Artificial Sequence
  Description of Artificial Sequence: Synthetic primer
gtattaaaaga

SEQ ID NO: 512 - DNA, 10 bp, Artificial Sequence
  Description of Artificial Sequence: Synthetic primer
gttaattgaa

SEQ ID NO: 513 - DNA, 7 bp, Artificial Sequence
  Description of Artificial Sequence: Synthetic primer
gttcgta

SEQ ID NO: 514 - DNA, 7 bp, Artificial Sequence
  Description of Artificial Sequence: Synthetic primer
gttgcga

SEQ ID NO: 515 - DNA, 11 bp, Artificial Sequence
  Description of Artificial Sequence: Synthetic primer
taaagataatg

SEQ ID NO: 516 - DNA, 9 bp, Artificial Sequence
  Description of Artificial Sequence: Synthetic primer
taaagcgtt

SEQ ID NO: 517 - DNA, 12 bp, Artificial Sequence
  Description of Artificial Sequence: Synthetic primer
taaagtgaaact

SEQ ID NO: 518 - DNA, 11 bp, Artificial Sequence
  Description of Artificial Sequence: Synthetic primer
taaatcttcta

SEQ ID NO: 519 - DNA, 10 bp, Artificial Sequence
  Description of Artificial Sequence: Synthetic primer
taacagaaga

SEQ ID NO: 520 - DNA, 12 bp, Artificial Sequence
  Description of Artificial Sequence: Synthetic primer
taacgaaagaag

SEQ ID NO: 521 - DNA, 9 bp, Artificial Sequence
  Description of Artificial Sequence: Synthetic primer
taacggaaa

SEQ ID NO: 522 - DNA, 11 bp, Artificial Sequence
  Description of Artificial Sequence: Synthetic primer
taactcttctt

SEQ ID NO: 523 - DNA, 8 bp, Artificial Sequence
  Description of Artificial Sequence: Synthetic primer
taatamcg

SEQ ID NO: 524 - DNA, 8 bp, Artificial Sequence
  Description of Artificial Sequence: Synthetic primer
taatcgya

SEQ ID NO: 525 - DNA, 10 bp, Artificial Sequence
  Description of Artificial Sequence: Synthetic primer
taatgaagaa

SEQ ID NO: 526 - DNA, 10 bp, Artificial Sequence
  Description of Artificial Sequence: Synthetic primer
taattgcttc

SEQ ID NO: 527 - DNA, 10 bp, Artificial Sequence
  Description of Artificial Sequence: Synthetic primer
tacaatttca

SEQ ID NO: 528 - DNA, 8 bp, Artificial Sequence
  Description of Artificial Sequence: Synthetic primer
taccgtta

SEQ ID NO: 529 - DNA, 11 bp, Artificial Sequence
  Description of Artificial Sequence: Synthetic primer
tacgaaagaag

SEQ ID NO: 530 - DNA, 10 bp, Artificial Sequence
  Description of Artificial Sequence: Synthetic primer
tacgaatgat

SEQ ID NO: 531 - DNA, 8 bp, Artificial Sequence
  Description of Artificial Sequence: Synthetic primer
tactcgtt

SEQ ID NO: 532 - DNA, 10 bp, Artificial Sequence
  Description of Artificial Sequence: Synthetic primer
tagaagaagt

SEQ ID NO: 533 - DNA, 11 bp, Artificial Sequence
  Description of Artificial Sequence: Synthetic primer
tagaagaagcg

SEQ ID NO: 534 - DNA, 9 bp, Artificial Sequence
  Description of Artificial Sequence: Synthetic primer
tagaagcga

SEQ ID NO: 535 - DNA, 12 bp, Artificial Sequence
  Description of Artificial Sequence: Synthetic primer
tatatcgactta

SEQ ID NO: 536 - DNA, 12 bp, Artificial Sequence
  Description of Artificial Sequence: Synthetic primer
tatatcrgcgat

SEQ ID NO: 537 - DNA, 12 bp, Artificial Sequence
  Description of Artificial Sequence: Synthetic primer
tatcggcgattt

SEQ ID NO: 538 - DNA, 9 bp, Artificial Sequence
  Description of Artificial Sequence: Synthetic primer
tatgtaacg

SEQ ID NO: 539 - DNA, 8 bp, Artificial Sequence
  Description of Artificial Sequence: Synthetic primer
tattagcg

SEQ ID NO: 540 - DNA, 8 bp, Artificial Sequence
  Description of Artificial Sequence: Synthetic primer
tattcgct

SEQ ID NO: 541 - DNA, 10 bp, Artificial Sequence
  Description of Artificial Sequence: Synthetic primer
tattgatgaa

SEQ ID NO: 542 - DNA, 10 bp, Artificial Sequence
  Description of Artificial Sequence: Synthetic primer
tawtacgaaa

SEQ ID NO: 543 - DNA, 10 bp, Artificial Sequence
  Description of Artificial Sequence: Synthetic primer
tcaattgcaa

SEQ ID NO: 544 - DNA, 11 bp, Artificial Sequence
  Description of Artificial Sequence: Synthetic primer
tcaattgcttc

SEQ ID NO: 545 - DNA, 9 bp, Artificial Sequence
  Description of Artificial Sequence: Synthetic primer
tcattacga

SEQ ID NO: 546 - DNA, 10 bp, Artificial Sequence
  Description of Artificial Sequence: Synthetic primer
tccaattgaa

SEQ ID NO: 547 - DNA, 10 bp, Artificial Sequence
  Description of Artificial Sequence: Synthetic primer
tccgaaagaa

SEQ ID NO: 548 - DNA, 8 bp, Artificial Sequence
  Description of Artificial Sequence: Synthetic primer
tccgctaa

SEQ ID NO: 549 - DNA, 7 bp, Artificial Sequence
  Description of Artificial Sequence: Synthetic primer
tccgtat

SEQ ID NO: 550 - DNA, 10 bp, Artificial Sequence
  Description of Artificial Sequence: Synthetic primer
tcctgttaca

SEQ ID NO: 551 - DNA, 7 bp, Artificial Sequence
  Description of Artificial Sequence: Synthetic primer
tcgcata

SEQ ID NO: 552 - DNA, 10 bp, Artificial Sequence
  Description of Artificial Sequence: Synthetic primer
tcgctttatt

SEQ ID NO: 553 - DNA, 8 bp, Artificial Sequence
  Description of Artificial Sequence: Synthetic primer
tcgtattg

SEQ ID NO: 554 - DNA, 10 bp, Artificial Sequence
  Description of Artificial Sequence: Synthetic primer
tcgttacaat

SEQ ID NO: 555 - DNA, 10 bp, Artificial Sequence
  Description of Artificial Sequence: Synthetic primer
tctacaatta

SEQ ID NO: 556 - DNA, 10 bp, Artificial Sequence
  Description of Artificial Sequence: Synthetic primer
tctactaatt

SEQ ID NO: 557 - DNA, 10 bp, Artificial Sequence
  Description of Artificial Sequence: Synthetic primer
tcttcaatat

SEQ ID NO: 558 - DNA, 10 bp, Artificial Sequence
  Description of Artificial Sequence: Synthetic primer
tcttctaacg

SEQ ID NO: 559 - DNA, 10 bp, Artificial Sequence
  Description of Artificial Sequence: Synthetic primer
tctttatatg

SEQ ID NO: 560 - DNA, 11 bp, Artificial Sequence
  Description of Artificial Sequence: Synthetic primer
tctttatattc

SEQ ID NO: 561 - DNA, 10 bp, Artificial Sequence
  Description of Artificial Sequence: Synthetic primer
tctttcgcta

SEQ ID NO: 562 - DNA, 11 bp, Artificial Sequence
  Description of Artificial Sequence: Synthetic primer
tcttttttcgc

SEQ ID NO: 563 - DNA, 10 bp, Artificial Sequence
  Description of Artificial Sequence: Synthetic primer
tgaaaaagcg

SEQ ID NO: 564 - DNA, 11 bp, Artificial Sequence
  Description of Artificial Sequence: Synthetic primer
tgaaacaattg

SEQ ID NO: 565 - DNA, 10 bp, Artificial Sequence
  Description of Artificial Sequence: Synthetic primer
tgaaacgaat

SEQ ID NO: 566 - DNA, 10 bp, Artificial Sequence
  Description of Artificial Sequence: Synthetic primer
tgaagcgatt

SEQ ID NO: 567 - DNA, 7 bp, Artificial Sequence
  Description of Artificial Sequence: Synthetic primer
tgcaacg

SEQ ID NO: 568 - DNA, 11 bp, Artificial Sequence
  Description of Artificial Sequence: Synthetic primer
tgcgaaagaaa

SEQ ID NO: 569 - DNA, 11 bp, Artificial Sequence
  Description of Artificial Sequence: Synthetic primer
tgcttcttcta

SEQ ID NO: 570 - DNA, 10 bp, Artificial Sequence
  Description of Artificial Sequence: Synthetic primer
tgtaaaaggt

SEQ ID NO: 571 - DNA, 12 bp, Artificial Sequence
  Description of Artificial Sequence: Synthetic primer
tgtcggtaagtc

SEQ ID NO: 572 - DNA, 11 bp, Artificial Sequence
  Description of Artificial Sequence: Synthetic primer
tgttctttcgt

SEQ ID NO: 573 - DNA, 11 bp, Artificial Sequence
  Description of Artificial Sequence: Synthetic primer
ttaacgaaaga

SEQ ID NO: 574 - DNA, 9 bp, Artificial Sequence
  Description of Artificial Sequence: Synthetic primer
ttaacggaa

SEQ ID NO: 575 - DNA, 10 bp, Artificial Sequence
  Description of Artificial Sequence: Synthetic primer
ttacgaaaga

SEQ ID NO: 576 - DNA, 10 bp, Artificial Sequence
  Description of Artificial Sequence: Synthetic primer
ttagaagatg

SEQ ID NO: 577 - DNA, 10 bp, Artificial Sequence
  Description of Artificial Sequence: Synthetic primer
ttattatcgg

SEQ ID NO: 578 - DNA, 9 bp, Artificial Sequence
  Description of Artificial Sequence: Synthetic primer
ttcaatacg

SEQ ID NO: 579 - DNA, 10 bp, Artificial Sequence
  Description of Artificial Sequence: Synthetic primer
ttcacgaata

SEQ ID NO: 580 - DNA, 8 bp, Artificial Sequence
  Description of Artificial Sequence: Synthetic primer
ttccgtaa

SEQ ID NO: 581 - DNA, 10 bp, Artificial Sequence
  Description of Artificial Sequence: Synthetic primer
ttcgtaaatt

SEQ ID NO: 582 - DNA, 9 bp, Artificial Sequence
  Description of Artificial Sequence: Synthetic primer
ttctttacg

SEQ ID NO: 583 - DNA, 10 bp, Artificial Sequence
  Description of Artificial Sequence: Synthetic primer
ttctttcgca

SEQ ID NO: 584 - DNA, 12 bp, Artificial Sequence
  Description of Artificial Sequence: Synthetic primer
ttctttcgttaa

SEQ ID NO: 585 - DNA, 10 bp, Artificial Sequence
  Description of Artificial Sequence: Synthetic primer
ttcttttata

SEQ ID NO: 586 - DNA, 10 bp, Artificial Sequence
  Description of Artificial Sequence: Synthetic primer
ttgcaattgc

SEQ ID NO: 587 - DNA, 10 bp, Artificial Sequence
  Description of Artificial Sequence: Synthetic primer
ttgtaattgg

SEQ ID NO: 588 - DNA, 11 bp, Artificial Sequence
  Description of Artificial Sequence: Synthetic primer
ttgtcggtaag

SEQ ID NO: 589 - DNA, 11 bp, Artificial Sequence
  Description of Artificial Sequence: Synthetic primer
tttattagatg

SEQ ID NO: 590 - DNA, 10 bp, Artificial Sequence
  Description of Artificial Sequence: Synthetic primer
tttcgtatat

SEQ ID NO: 591 - DNA, 10 bp, Artificial Sequence
  Description of Artificial Sequence: Synthetic primer
tttcgttata

SEQ ID NO: 592 - DNA, 10 bp, Artificial Sequence
  Description of Artificial Sequence: Synthetic primer
tttwtcgtaa

SEQ ID NO: 593 - DNA, 9 bp, Artificial Sequence
  Description of Artificial Sequence: Synthetic primer
twacgattg

SEQ ID NO: 594 - DNA, 21 bp, Artificial Sequence
  Description of Artificial Sequence: Synthetic primer
tagaacaccgatggcgaaggc

SEQ ID NO: 595 - DNA, 23 bp, Artificial Sequence
  Description of Artificial Sequence: Synthetic primer
tttcgatgcaacgcgaagaacct

SEQ ID NO: 596 - DNA, 19 bp, Artificial Sequence
  Description of Artificial Sequence: Synthetic primer
tctgacacctgcccggtgc

SEQ ID NO: 597 - DNA, 25 bp, Artificial Sequence
  Description of Artificial Sequence: Synthetic primer
tctggcaggtatgcgtggtctgatg

SEQ ID NO: 598 - DNA, 21 bp, Artificial Sequence
  Description of Artificial Sequence: Synthetic primer
tcgtggcggcgtggttatcga

SEQ ID NO: 599 - DNA, 23 bp, Artificial Sequence
  Description of Artificial Sequence: Synthetic primer
ttatcgctcaggcgaactccaac

SEQ ID NO: 600 - DNA, 21 bp, Artificial Sequence
  Description of Artificial Sequence: Synthetic primer
tccacacggtggtggtgaagg

SEQ ID NO: 601 - DNA, 30 bp, Artificial Sequence
  Description of Artificial Sequence: Synthetic primer
tgaacgtggtcaaatcaaagttggtgaaga

SEQ ID NO: 602 - DNA, 22 bp, Artificial Sequence
  Description of Artificial Sequence: Synthetic primer
tcgtggactaccagggtatcta

SEQ ID NO: 603 - DNA, 21 bp, Artificial Sequence
  Description of Artificial Sequence: Synthetic primer
tacgagctgacgacagccatg

SEQ ID NO: 604 - DNA, 20 bp, Artificial Sequence
  Description of Artificial Sequence: Synthetic primer
tgaccgttatagttacggcc

SEQ ID NO: 605 - DNA, 26 bp, Artificial Sequence
  Description of Artificial Sequence: Synthetic primer
tcgcaccgtgggttgagatgaagtac

SEQ ID NO: 606 - DNA, 25 bp, Artificial Sequence
  Description of Artificial Sequence: Synthetic primer
tcggtacgaactggatgtcgccgtt

SEQ ID NO: 607 - DNA, 22 bp, Artificial Sequence
  Description of Artificial Sequence: Synthetic primer
tgctggattcgcctttgctacg

SEQ ID NO: 608 - DNA, 22 bp, Artificial Sequence
  Description of Artificial Sequence: Synthetic primer
tgtgctggtttaccccatggag

SEQ ID NO: 609 - DNA, 28 bp, Artificial Sequence
  Description of Artificial Sequence: Synthetic primer
tgtcaccagcttcagcgtagtctaataa

SEQ ID NO: 610 - DNA, 24 bp, Artificial Sequence
  Description of Artificial Sequence: Synthetic primer
tcagttcggtggccagcgcttcgg

SEQ ID NO: 611 - DNA, 24 bp, Artificial Sequence
  Description of Artificial Sequence: Synthetic primer
tcagttcggtggtcagcgcttcgg

SEQ ID NO: 612 - DNA, 28 bp, Artificial Sequence
  Description of Artificial Sequence: Synthetic primer
tcatactcatgaaggtggaacgcatgaa

SEQ ID NO: 613 - DNA, 30 bp, Artificial Sequence
  Description of Artificial Sequence: Synthetic primer
tccaactgttcgtggttctgtaatgaaccc

SEQ ID NO: 614 - DNA, 21 bp, Artificial Sequence
  Description of Artificial Sequence: Synthetic primer
tccacacggtggtggtgaagg

SEQ ID NO: 615 - DNA, 23 bp, Artificial Sequence
  Description of Artificial Sequence: Synthetic primer
tccaccggtccgtactccatgat

SEQ ID NO: 616 - DNA, 28 bp, Artificial Sequence
  Description of Artificial Sequence: Synthetic primer
tgaaccacttggttgacgacaagatgca

SEQ ID NO: 617 - DNA, 25 bp, Artificial Sequence
  Description of Artificial Sequence: Synthetic primer
tgaaccctaacgatcacccacacgg

SEQ ID NO: 618 - DNA, 25 bp, Artificial Sequence
  Description of Artificial Sequence: Synthetic primer
tgaaccctaatgatcacccacacgg

SEQ ID NO: 619 - DNA, 21 bp, Artificial Sequence
  Description of Artificial Sequence: Synthetic primer
tgacaagatgcacgcgcgttc

SEQ ID NO: 620 - DNA, 24 bp, Artificial Sequence
  Description of Artificial Sequence: Synthetic primer
tgatcactggtgctgctcaaatgg

SEQ ID NO: 621 - DNA, 18 bp, Artificial Sequence
  Description of Artificial Sequence: Synthetic primer
tggcgaccgtggcggcgt

SEQ ID NO: 622 - DNA, 23 bp, Artificial Sequence
  Description of Artificial Sequence: Synthetic primer
tgtggcggcgtggttatcgaacc

SEQ ID NO: 623 - DNA, 27 bp, Artificial Sequence
  Description of Artificial Sequence: Synthetic primer
tgttgatgacaagatgcacgcgcgttc

SEQ ID NO: 624 - DNA, 19 bp, Artificial Sequence
  Description of Artificial Sequence: Synthetic primer
ccgaagcgctggccaccga

SEQ ID NO: 625 - DNA, 27 bp, Artificial Sequence
  Description of Artificial Sequence: Synthetic primer
tacgtcgtccgacttgaccgtcagcat

SEQ ID NO: 626 - DNA, 29 bp, Artificial Sequence
  Description of Artificial Sequence: Synthetic primer
tactgcttcgggacgaactggatgtcgcc

SEQ ID NO: 627 - DNA, 23 bp, Artificial Sequence
  Description of Artificial Sequence: Synthetic primer
tcaccgaaacgctgaccaccgaa

SEQ ID NO: 628 - DNA, 21 bp, Artificial Sequence
  Description of Artificial Sequence: Synthetic primer
tccaagcgcaggtttacccca

SEQ ID NO: 629 - DNA, 21 bp, Artificial Sequence
  Description of Artificial Sequence: Synthetic primer
tccaagcgcaggtttacccca

SEQ ID NO: 630 - DNA, 24 bp, Artificial Sequence
  Description of Artificial Sequence: Synthetic primer
tccaagcgcaggtttaccccatgg

SEQ ID NO: 631 - DNA, 21 bp, Artificial Sequence
  Description of Artificial Sequence: Synthetic primer
tccaagcgctggtttacccca

SEQ ID NO: 632 - DNA, 26 bp, Artificial Sequence
  Description of Artificial Sequence: Synthetic primer
tccatctcaccgaaacgctgaccacc

SEQ ID NO: 633 - DNA, 26 bp, Artificial Sequence
  Description of Artificial Sequence: Synthetic primer
tccgacttgaccgtcagcatctcctg

SEQ ID NO: 634 - DNA, 23 bp, Artificial Sequence
  Description of Artificial Sequence: Synthetic primer
tcgtactgcttcgggacgaactg

SEQ ID NO: 635 - DNA, 29 bp, Artificial Sequence
  Description of Artificial Sequence: Synthetic primer
tcgtcggacttgatggtcagcagctcctg

SEQ ID NO: 636 - DNA, 22 bp, Artificial Sequence
  Description of Artificial Sequence: Synthetic primer
tctcaccgaaacgctgaccacc

SEQ ID NO: 637 - DNA, 24 bp, Artificial Sequence
  Description of Artificial Sequence: Synthetic primer
tgcagtcaagccttcacgaacatc

SEQ ID NO: 638 - DNA, 26 bp, Artificial Sequence
  Description of Artificial Sequence: Synthetic primer
tggatgtgttcacgagtttgaggcat

SEQ ID NO: 639 - DNA, 27 bp, Artificial Sequence
  Description of Artificial Sequence: Synthetic primer
tcccattgtactggcatacatgcttga

SEQ ID NO: 640 - DNA, 31 bp, Artificial Sequence
  Description of Artificial Sequence: Synthetic primer
tacatccagatgtgcactgaactcaaactca

SEQ ID NO: 641 - DNA, 27 bp, Artificial Sequence
  Description of Artificial Sequence: Synthetic primer
tccaatcatcagaccagcaacccttgc

SEQ ID NO: 642 - DNA, 28 bp, Artificial Sequence
  Description of Artificial Sequence: Synthetic primer
tcttgccagttgtatgggcctcatatac

SEQ ID NO: 643 - DNA, 23 bp, Artificial Sequence
  Description of Artificial Sequence: Synthetic primer
tgggattcctttcgtcagtccga

SEQ ID NO: 644 - DNA, 34 bp, Artificial Sequence
  Description of Artificial Sequence: Synthetic primer
tccaggacatactgatgaggatgtcaaaaatgca

SEQ ID NO: 645 - DNA, 28 bp, Artificial Sequence
  Description of Artificial Sequence: Synthetic primer
tgtcaaaaatgcaattggggtcctcatc

SEQ ID NO: 646 - DNA, 26 bp, Artificial Sequence
  Description of Artificial Sequence: Synthetic primer
tgtcctggaatgatgatgggcatgtt

SEQ ID NO: 647 - DNA, 27 bp, Artificial Sequence
  Description of Artificial Sequence: Synthetic primer
tatgaactcagctgatgttgctcctgc

SEQ ID NO: 648 - DNA, 31 bp, Artificial Sequence
  Description of Artificial Sequence: Synthetic primer
tcgtcaaatgcagagagcaccattctctcta

SEQ ID NO: 649 - DNA, 26 bp, Artificial Sequence
  Description of Artificial Sequence: Synthetic primer
tccgatatcagcttcactgcttgtgg

SEQ ID NO: 650 - DNA, 23 bp, Artificial Sequence
  Description of Artificial Sequence: Synthetic primer
tgggagtcagcaatctgctcaca

SEQ ID NO: 651 - DNA, 27 bp, Artificial Sequence
  Description of Artificial Sequence: Synthetic primer
tggagaagttcggtgggagactttggt

SEQ ID NO: 652 - DNA, 24 bp, Artificial Sequence
  Description of Artificial Sequence: Synthetic primer
tgcttccccaagcgaatctctgta

SEQ ID NO: 653 - DNA, 31 bp, Artificial Sequence
  Description of Artificial Sequence: Synthetic primer
tcattactgcttctccaagcgaatctctgta

SEQ ID NO: 654 - DNA, 25 bp, Artificial Sequence
  Description of Artificial Sequence: Synthetic primer
tcatcagaggattggagtccatccc

SEQ ID NO: 655 - DNA, 24 bp, Artificial Sequence
  Description of Artificial Sequence: Synthetic primer
tcagcggaggtgacatgtatcaca

SEQ ID NO: 656 - DNA, 24 bp, Artificial Sequence
  Description of Artificial Sequence: Synthetic primer
tcgaccaaccttaaacgcactcca

SEQ ID NO: 657 - DNA, 19 bp, Artificial Sequence
  Description of Artificial Sequence: Synthetic primer
ttagcacctcgacggctgg

SEQ ID NO: 658 - DNA, 24 bp, Artificial Sequence
  Description of Artificial Sequence: Synthetic primer
tgctcggacctttacttggtcacg

SEQ ID NO: 659 - DNA, 22 bp, Artificial Sequence
  Description of Artificial Sequence: Synthetic primer
tgcccgtctcctacttgaaggg

SEQ ID NO: 660 - DNA, 18 bp, Artificial Sequence
  Description of Artificial Sequence: Synthetic primer
tttgcgggcaccttccgg

SEQ ID NO: 661 - DNA, 23 bp, Artificial Sequence
  Description of Artificial Sequence: Synthetic primer
tggctcggttgtacagggatgaa

SEQ ID NO: 662 - DNA, 25 bp, Artificial Sequence
  Description of Artificial Sequence: Synthetic primer
tactcctcctttcggtagcggtaga

SEQ ID NO: 663 - DNA, 25 bp, Artificial Sequence
  Description of Artificial Sequence: Synthetic primer
gacatgtatcacaacctgtcgcaca

SEQ ID NO: 664 - DNA, 22 bp, Artificial Sequence
  Description of Artificial Sequence: Synthetic primer
catgctaatgtcgttccggcga

SEQ ID NO: 665 - DNA, 23 bp, Artificial Sequence
  Description of Artificial Sequence: Synthetic primer
catgctgatgtcattccggtgca

SEQ ID NO: 666 - DNA, 19 bp, Artificial Sequence
  Description of Artificial Sequence: Synthetic primer
tcgggtggtccactgctca

SEQ ID NO: 667 - DNA, 18 bp, Artificial Sequence
  Description of Artificial Sequence: Synthetic primer
gctgtgtacacccggcga

SEQ ID NO: 668 - DNA, 21 bp, Artificial Sequence
  Description of Artificial Sequence: Synthetic primer
atgcggtatccggtcctcaca

SEQ ID NO: 669 - DNA, 22 bp, Artificial Sequence
  Description of Artificial Sequence: Synthetic primer
tgcccaacggactacttcctga

SEQ ID NO: 670 - DNA, 19 bp, Artificial Sequence
  Description of Artificial Sequence: Synthetic primer
tgtggccgcgatcaaggag

SEQ ID NO: 671 - DNA, 23 bp, Artificial Sequence
  Description of Artificial Sequence: Synthetic primer
tcagccagctgagccaattcatg

SEQ ID NO: 672 - DNA, 18 bp, Artificial Sequence
  Description of Artificial Sequence: Synthetic primer
tcgctgtcggggttgacc

SEQ ID NO: 673 - DNA, 20 bp, Artificial Sequence
  Description of Artificial Sequence: Synthetic primer
tgctctggcatgtcatcggc

SEQ ID NO: 674 - DNA, 19 bp, Artificial Sequence
  Description of Artificial Sequence: Synthetic primer
tgacggctacatcctgggc

SEQ ID NO: 675 - DNA, 23 bp, Artificial Sequence
  Description of Artificial Sequence: Synthetic primer
tgctcgtggacataccgatttcg

SEQ ID NO: 676 - DNA, 20 bp, Artificial Sequence
  Description of Artificial Sequence: Synthetic primer
tcggtaaggacgcgatcacc

SEQ ID NO: 677 - DNA, 22 bp, Artificial Sequence
  Description of Artificial Sequence: Synthetic primer
tgccagccttaagagccagatc

SEQ ID NO: 678 - DNA, 16 bp, Artificial Sequence
  Description of Artificial Sequence: Synthetic primer
tcacccgcacggcgac

SEQ ID NO: 679 - DNA, 20 bp, Artificial Sequence
  Description of Artificial Sequence: Synthetic primer
tcgacgcgtcgatctacgac

SEQ ID NO: 680 - DNA, 18 bp, Artificial Sequence
  Description of Artificial Sequence: Synthetic primer
tggctctgaagggcagcc

SEQ ID NO: 681 - DNA, 17 bp, Artificial Sequence
  Description of Artificial Sequence: Synthetic primer
tctgtggctgccgcgtc

SEQ ID NO: 682 - DNA, 20 bp, Artificial Sequence
  Description of Artificial Sequence: Synthetic primer
tcatcacgtcgtggcaacca

SEQ ID NO: 683 - DNA, 18 bp, Artificial Sequence
  Description of Artificial Sequence: Synthetic primer
tgtgcctacaccggagcg

SEQ ID NO: 684 - DNA, 20 bp, Artificial Sequence
  Description of Artificial Sequence: Synthetic primer
tccgatcattgtgtgcgcca

SEQ ID NO: 685 - DNA, 26 bp, Artificial Sequence
  Description of Artificial Sequence: Synthetic primer
tcgacccgtcgtaggtaatacgatac

SEQ ID NO: 686 - DNA, 25 bp, Artificial Sequence
  Description of Artificial Sequence: Synthetic primer
tgcctgtttgaaactgcccacatac

SEQ ID NO: 687 - DNA, 20 bp, Artificial Sequence
  Description of Artificial Sequence: Synthetic primer
tgccttggtcgggcacattc

SEQ ID NO: 688 - DNA, 19 bp, Artificial Sequence
  Description of Artificial Sequence: Synthetic primer
tctgcccgccgagcaatac

SEQ ID NO: 689 - DNA, 24 bp, Artificial Sequence
  Description of Artificial Sequence: Synthetic primer
tccgtaagtcggtgttgaccaaac

SEQ ID NO: 690 - DNA, 19 bp, Artificial Sequence
  Description of Artificial Sequence: Synthetic primer
tcgggtccaccacggaatg

SEQ ID NO: 691 - DNA, 19 bp, Artificial Sequence
  Description of Artificial Sequence: Synthetic primer
tgccgacgcgatcgaacag

SEQ ID NO: 692 - DNA, 21 bp, Artificial Sequence
  Description of Artificial Sequence: Synthetic primer
tgaccaagaccaagttgggca

SEQ ID NO: 693 - DNA, 17 bp, Artificial Sequence
  Description of Artificial Sequence: Synthetic primer
tgcccagagccgttcgt

SEQ ID NO: 694 - DNA, 17 bp, Artificial Sequence
  Description of Artificial Sequence: Synthetic primer
tagcccggcacgctcac

SEQ ID NO: 695 - DNA, 20 bp, Artificial Sequence
  Description of Artificial Sequence: Synthetic primer
tccgacagcgggttgttctg

SEQ ID NO: 696 - DNA, 17 bp, Artificial Sequence
  Description of Artificial Sequence: Synthetic primer
tccgacagtcggcgctt

SEQ ID NO: 697 - DNA, 20 bp, Artificial Sequence
  Description of Artificial Sequence: Synthetic primer
tgaagggatcctccgggctg

SEQ ID NO: 698 - DNA, 17 bp, Artificial Sequence
  Description of Artificial Sequence: Synthetic primer
tgcgtggtcggcgactc

SEQ ID NO: 699 - DNA, 20 bp, Artificial Sequence
  Description of Artificial Sequence: Synthetic primer
tcagtggctgtggcagtcac

SEQ ID NO: 700 - DNA, 21 bp, Artificial Sequence
  Description of Artificial Sequence: Synthetic primer
tgtccatacgacctcgatgcc

SEQ ID NO: 701 - DNA, 23 bp, Artificial Sequence
  Description of Artificial Sequence: Synthetic primer
tgtgagacagtcaatcccgatgc

SEQ ID NO: 702 - DNA, 17 bp, Artificial Sequence
  Description of Artificial Sequence: Synthetic primer
tgggccatgcgcaccag

SEQ ID NO: 703 - DNA, 19 bp, Artificial Sequence
  Description of Artificial Sequence: Synthetic primer
tgccgtgacctcgacctga

SEQ ID NO: 704 - DNA, 17 bp, Artificial Sequence
  Description of Artificial Sequence: Synthetic primer
tcggcgccaccggttac

SEQ ID NO: 705 - DNA, 22 bp, Artificial Sequence
  Description of Artificial Sequence: Synthetic primer
tacgtgtccagactgggatgga

SEQ ID NO: 706 - DNA, 21 bp, Artificial Sequence
  Description of Artificial Sequence: Synthetic primer
tcgtctggcgcacacaatgat

SEQ ID NO: 707 - DNA, 19 bp, Artificial Sequence
  Description of Artificial Sequence: Synthetic primer
tggtgcgcatctcctccag

SEQ ID NO: 708 - DNA, 17 bp, Artificial Sequence
  Description of Artificial Sequence: Synthetic primer
tgccgaggtggcgcatt

SEQ ID NO: 709 - DNA, 21 bp, Artificial Sequence
  Description of Artificial Sequence: Synthetic primer
tcgggctcaacgacacttcct

SEQ ID NO: 710 - DNA, 19 bp, Artificial Sequence
  Description of Artificial Sequence: Synthetic primer
tccaccggaacccggatca

SEQ ID NO: 711 - DNA, 17 bp, Artificial Sequence
  Description of Artificial Sequence: Synthetic primer
tggtccgggtacgcgga

SEQ ID NO: 712 - DNA, 23 bp, Artificial Sequence
  Description of Artificial Sequence: Synthetic primer
tggcgggtagataaagctggaca

SEQ ID NO: 713 - DNA, 23 bp, Artificial Sequence
  Description of Artificial Sequence: Synthetic primer
tggatgccgccatagttcttgtc

SEQ ID NO: 714 - DNA, 19 bp, Artificial Sequence
  Description of Artificial Sequence: Synthetic primer
taacagctcggccatggcg

SEQ ID NO: 715 - DNA, 22 bp, Artificial Sequence
  Description of Artificial Sequence: Synthetic primer
tgaggacacagccttgttcaca

SEQ ID NO: 716 - DNA, 17 bp, Artificial Sequence
  Description of Artificial Sequence: Synthetic primer
tacacccacgccgtgga

SEQ ID NO: 717 - DNA, 24 bp, Artificial Sequence
  Description of Artificial Sequence: Synthetic primer
tcaggtactgctatccaccctcaa

SEQ ID NO: 718 - DNA, 28 bp, Artificial Sequence
  Description of Artificial Sequence: Synthetic primer
tttacacatatcgtgagcaatgaactga

SEQ ID NO: 719 - DNA, 30 bp, Artificial Sequence
  Description of Artificial Sequence: Synthetic primer
tagctatcttatcgttgagaagggatttgc

SEQ ID NO: 720 - DNA, 32 bp, Artificial Sequence
  Description of Artificial Sequence: Synthetic primer
tctgaacatgataatatctttgaaatcggctc

SEQ ID NO: 721 - DNA, 26 bp, Artificial Sequence
  Description of Artificial Sequence: Synthetic primer
tgagctgcatcaactgtattggatag

SEQ ID NO: 722 - DNA, 30 bp, Artificial Sequence
  Description of Artificial Sequence: Synthetic primer
tacaaaggtcaaccaatgacattcagacta

SEQ ID NO: 723 - DNA, 31 bp, Artificial Sequence
  Description of Artificial Sequence: Synthetic primer
taattgggctctttctcgcttaaacacctta

SEQ ID NO: 724 - DNA, 23 bp, Artificial Sequence
  Description of Artificial Sequence: Synthetic primer
tgccgtgttgaacgtggtcaaat

SEQ ID NO: 725 - DNA, 29 bp, Artificial Sequence
  Description of Artificial Sequence: Synthetic primer
tagataattgggctctttctcgcttaaac

SEQ ID NO: 726 - DNA, 28 bp, Artificial Sequence
  Description of Artificial Sequence: Synthetic primer
tcgtcatcagctaactcaaatacatgga

SEQ ID NO: 727 - DNA, 27 bp, Artificial Sequence
  Description of Artificial Sequence: Synthetic primer
tggatagacgtcatatgaaggtgtgct

SEQ ID NO: 728 - DNA, 28 bp, Artificial Sequence
  Description of Artificial Sequence: Synthetic primer
ttgtgatatggaggtgtagaaggtgtta

SEQ ID NO: 729 - DNA, 28 bp, Artificial Sequence
  Description of Artificial Sequence: Synthetic primer
tgagcatttttatatccatctccaccat

SEQ ID NO: 730 - DNA, 34 bp, Artificial Sequence
  Description of Artificial Sequence: Synthetic primer
tccgtagttttgcataatttatggtctatttcaa

SEQ ID NO: 731 - DNA, 30 bp, Artificial Sequence
  Description of Artificial Sequence: Synthetic primer
tggaaaactcatgaaattaaagtgaaagga

SEQ ID NO: 732 - DNA, 26 bp, Artificial Sequence
  Description of Artificial Sequence: Synthetic primer
taaatgcacttgcttcagggccatat

SEQ ID NO: 733 - DNA, 27 bp, Artificial Sequence
  Description of Artificial Sequence: Synthetic primer
ttaatctggctgcggaagtgaaatcgt

SEQ ID NO: 734 - DNA, 31 bp, Artificial Sequence
  Description of Artificial Sequence: Synthetic primer
tgcttcagcgtagtctaataatttacggaac

SEQ ID NO: 735 - DNA, 23 bp, Artificial Sequence
  Description of Artificial Sequence: Synthetic primer
taatctggctgcggaagtgaaat

SEQ ID NO: 736 - DNA, 28 bp, Artificial Sequence
  Description of Artificial Sequence: Synthetic primer
tcactttgatatgtggatccgtcattca

SEQ ID NO: 737 - DNA, 30 bp, Artificial Sequence
  Description of Artificial Sequence: Synthetic primer
taaggtatgacaccggataaatcatataaa

SEQ ID NO: 738 - DNA, 29 bp, Artificial Sequence
  Description of Artificial Sequence: Synthetic primer
taatgggtaaatatcaccctcatggtgac

SEQ ID NO: 739 - DNA, 28 bp, Artificial Sequence
  Description of Artificial Sequence: Synthetic primer
tcaccctcatggtgactcatctatttat

SEQ ID NO: 740 - DNA, 23 bp, Artificial Sequence
  Description of Artificial Sequence: Synthetic primer
tcttgagccatacgtaccattgc

SEQ ID NO: 741 - DNA, 28 bp, Artificial Sequence
  Description of Artificial Sequence: Synthetic primer
tatccattgaaccaaagttaccttggcc

SEQ ID NO: 742 - DNA, 31 bp, Artificial Sequence
  Description of Artificial Sequence: Synthetic primer
tagccatacgtaccattgcttcataaataga

SEQ ID NO: 743 - DNA, 44 bp, Artificial Sequence
  Description of Artificial Sequence: Synthetic oligonucleotide
atcagcggatctgactgactgactggcatgtagcggattgcatg

SEQ ID NO: 744 - DNA, 10 bp, Artificial Sequence
  Description of Artificial Sequence: Synthetic oligonucleotide
cgcgcgcgcg

SEQ ID NO: 745 - DNA, 10 bp, Artificial Sequence
  Description of Artificial Sequence: Synthetic oligonucleotide
cgccgcgcgc

SEQ ID NO: 746 - DNA, 10 bp, Artificial Sequence
  Description of Artificial Sequence: Synthetic oligonucleotide
gcgcgcggcg

SEQ ID NO: 747 - DNA, 10 bp, Artificial Sequence
  Description of Artificial Sequence: Synthetic oligonucleotide
cgcgcgcggc

SEQ ID NO: 748 - DNA, 10 bp, Artificial Sequence
  Description of Artificial Sequence: Synthetic oligonucleotide
gccgcgcgcg

SEQ ID NO: 749 - DNA, 10 bp, Artificial Sequence
  Description of Artificial Sequence: Synthetic oligonucleotide
cgcgccgcgc

SEQ ID NO: 750 - DNA, 10 bp, Artificial Sequence
  Description of Artificial Sequence: Synthetic oligonucleotide
gcgcggcgcg

SEQ ID NO: 751 - DNA, 10 bp, Artificial Sequence
  Description of Artificial Sequence: Synthetic oligonucleotide
gcgcgcgcgc

SEQ ID NO: 752 - DNA, 10 bp, Artificial Sequence
  Description of Artificial Sequence: Synthetic oligonucleotide
cgcgcggcgc

SEQ ID NO: 753 - DNA, 10 bp, Artificial Sequence
  Description of Artificial Sequence: Synthetic oligonucleotide
gcgccgcgcg

SEQ ID NO: 754 - DNA, 10 bp, Artificial Sequence
  Description of Artificial Sequence: Synthetic oligonucleotide
cgcgcgccgc

SEQ ID NO: 755 - DNA, 10 bp, Artificial Sequence
  Description of Artificial Sequence: Synthetic oligonucleotide
gcggcgcgcg

SEQ ID NO: 756 - DNA, 10 bp, Artificial Sequence
  Description of Artificial Sequence: Synthetic oligonucleotide
cgcgagcgcg

SEQ ID NO: 757 - DNA, 10 bp, Artificial Sequence
  Description of Artificial Sequence: Synthetic oligonucleotide
cgcgctcgcg

SEQ ID NO: 758 - DNA, 20 bp, Artificial Sequence
  Description of Artificial Sequence: Synthetic primer
tctgcttctcaaaatgtaag

SEQ ID NO: 759 - DNA, 16 bp, Artificial Sequence
  Description of Artificial Sequence: Synthetic primer
aagcccaatcctagag

SEQ ID NO: 760 - DNA, 20 bp, Artificial Sequence
  Description of Artificial Sequence: Synthetic primer
taaccaaatgcacatgttat

SEQ ID NO: 761 - DNA, 21 bp, Artificial Sequence
  Description of Artificial Sequence: Synthetic primer
tagaattcaaactagatgctg

SEQ ID NO: 762 - DNA, 16 bp, Artificial Sequence
  Description of Artificial Sequence: Synthetic primer
ttgctgatcaagctca

SEQ ID NO: 763 - DNA, 23 bp, Artificial Sequence
  Description of Artificial Sequence: Synthetic primer
cggttcaattactacatattttt

SEQ ID NO: 764 - DNA, 18 bp, Artificial Sequence
  Description of Artificial Sequence: Synthetic primer
gcaacttacagacgaaat

SEQ ID NO: 765 - DNA, 15 bp, Artificial Sequence
  Description of Artificial Sequence: Synthetic primer
gcccggttcaattac

SEQ ID NO: 766 - DNA, 20 bp, Artificial Sequence
  Description of Artificial Sequence: Synthetic primer
agacagaggttctatacaaa

SEQ ID NO: 767 - DNA, 20 bp, Artificial Sequence
  Description of Artificial Sequence: Synthetic primer
tcttcatttaaaagctgcat

SEQ ID NO: 768 - DNA, 17 bp, Artificial Sequence
  Description of Artificial Sequence: Synthetic primer
aggtaacggcacatatt

SEQ ID NO: 769 - DNA, 19 bp, Artificial Sequence
  Description of Artificial Sequence: Synthetic primer
gctctctagcttctatgta

SEQ ID NO: 770 - DNA, 19 bp, Artificial Sequence
  Description of Artificial Sequence: Synthetic primer
taagaatgaaggaattggc

SEQ ID NO: 771 - DNA, 22 bp, Artificial Sequence
  Description of Artificial Sequence: Synthetic primer
aagcattaaaagacataccata

SEQ ID NO: 772 - DNA, 25 bp, Artificial Sequence
  Description of Artificial Sequence: Synthetic primer
aatttaaatgaagtagaaaaagtct

SEQ ID NO: 773 - DNA, 20 bp, Artificial Sequence
  Description of Artificial Sequence: Synthetic primer
gaagagttttaatagcctca

SEQ ID NO: 774 - DNA, 23 bp, Artificial Sequence
  Description of Artificial Sequence: Synthetic primer
ggctattaattttattcagacaa

SEQ ID NO: 775 - DNA, 17 bp, Artificial Sequence
  Description of Artificial Sequence: Synthetic primer
gacgaaagctcatcaag

SEQ ID NO: 776 - DNA, 18 bp, Artificial Sequence
  Description of Artificial Sequence: Synthetic primer
ttgtcacaagcttctaga

SEQ ID NO: 777 - DNA, 26 bp, Artificial Sequence
  Description of Artificial Sequence: Synthetic primer
cagttttatcatctttatctatcatt

SEQ ID NO: 778 - DNA, 21 bp, Artificial Sequence
  Description of Artificial Sequence: Synthetic primer
tttctggtaagattaatgctc

SEQ ID NO: 779 - DNA, 23 bp, Artificial Sequence
  Description of Artificial Sequence: Synthetic primer
aaattctcaataatttcaagacg

SEQ ID NO: 780 - DNA, 16 bp, Artificial Sequence
  Description of Artificial Sequence: Synthetic primer
gagcttctgatgatgc

SEQ ID NO: 781 - DNA, 17 bp, Artificial Sequence
  Description of Artificial Sequence: Synthetic primer
atccactctggcttatt

SEQ ID NO: 782 - DNA, 18 bp, Artificial Sequence
  Description of Artificial Sequence: Synthetic primer
gcaacattagctgcataa

SEQ ID NO: 783 - DNA, 14 bp, Artificial Sequence
  Description of Artificial Sequence: Synthetic primer
cgtgaagctgcaag

SEQ ID NO: 784 - DNA, 14 bp, Artificial Sequence
  Description of Artificial Sequence: Synthetic primer
tccctcaccagaga

SEQ ID NO: 785 - DNA, 19 bp, Artificial Sequence
  Description of Artificial Sequence: Synthetic primer
tggaaaagcaataaaagct

SEQ ID NO: 786 - DNA, 15 bp, Artificial Sequence
  Description of Artificial Sequence: Synthetic primer
acaccctcttgaacc

SEQ ID NO: 787 - DNA, 23 bp, Artificial Sequence
  Description of Artificial Sequence: Synthetic primer
tgttgtatatgaacatttattgg

SEQ ID NO: 788 - DNA, 16 bp, Artificial Sequence
  Description of Artificial Sequence: Synthetic primer
tgagaaggtgctgtag

SEQ ID NO: 789 - DNA, 20 bp, Artificial Sequence
  Description of Artificial Sequence: Synthetic primer
gcttggtaattctgagataa

SEQ ID NO: 790 - DNA, 23 bp, Artificial Sequence
  Description of Artificial Sequence: Synthetic primer
ttgtaacattaacaggagaatta

SEQ ID NO: 791 - DNA, 19 bp, Artificial Sequence
  Description of Artificial Sequence: Synthetic primer
cctcaatttgaaggtcaaa

SEQ ID NO: 792 - DNA, 20 bp, Artificial Sequence
  Description of Artificial Sequence: Synthetic primer
ttagcaagtgatgtattagc

SEQ ID NO: 793 - DNA, 19 bp, Artificial Sequence
  Description of Artificial Sequence: Synthetic primer
attttaaagaggggcttac

SEQ ID NO: 794 - DNA, 23 bp, Artificial Sequence
  Description of Artificial Sequence: Synthetic primer
tgatcacttatcattctaatagc

SEQ ID NO: 795 - DNA, 17 bp, Artificial Sequence
  Description of Artificial Sequence: Synthetic primer
gccatgaatgaagcttt

SEQ ID NO: 796 - DNA, 18 bp, Artificial Sequence
  Description of Artificial Sequence: Synthetic primer
ctattttggaaagcacct

SEQ ID NO: 797 - DNA, 21 bp, Artificial Sequence
  Description of Artificial Sequence: Synthetic primer
ctcatgttatgggatttagaa

SEQ ID NO: 798 - DNA, 23 bp, Artificial Sequence
  Description of Artificial Sequence: Synthetic primer
gcatactcagtactattctttat

SEQ ID NO: 799 - DNA, 21 bp, Artificial Sequence
  Description of Artificial Sequence: Synthetic primer
ctgacaacattctttcttttg

SEQ ID NO: 800 - DNA, 20 bp, Artificial Sequence
  Description of Artificial Sequence: Synthetic primer
tgagcataagatgcttttag

SEQ ID NO: 801 - DNA, 17 bp, Artificial Sequence
  Description of Artificial Sequence: Synthetic primer
tgttaatgtggggctta

SEQ ID NO: 802 - DNA, 18 bp, Artificial Sequence
  Description of Artificial Sequence: Synthetic primer
tctgtcattgtagcatct

SEQ ID NO: 803 - DNA, 18 bp, Artificial Sequence
  Description of Artificial Sequence: Synthetic primer
gcttttcaatcagaacct

SEQ ID NO: 804 - DNA, 24 bp, Artificial Sequence
  Description of Artificial Sequence: Synthetic primer
ttaaaatactattagttgttgctg

SEQ ID NO: 805 - DNA, 18 bp, Artificial Sequence
  Description of Artificial Sequence: Synthetic primer
gagggtgggataaaatct

SEQ ID NO: 806 - DNA, 14 bp, Artificial Sequence
  Description of Artificial Sequence: Synthetic primer
attagcctgcgcaa

SEQ ID NO: 807 - DNA, 19 bp, Artificial Sequence
  Description of Artificial Sequence: Synthetic primer
cccattttagcacttcctc

SEQ ID NO: 808 - DNA, 15 bp, Artificial Sequence
  Description of Artificial Sequence: Synthetic primer
ccgaaaaagatgggc

SEQ ID NO: 809 - DNA, 16 bp, Artificial Sequence
  Description of Artificial Sequence: Synthetic primer
gcaaaatggcctgaaa

SEQ ID NO: 810 - DNA, 19 bp, Artificial Sequence
  Description of Artificial Sequence: Synthetic primer
aggttaaaaagtccgaaac

SEQ ID NO: 811 - DNA, 21 bp, Artificial Sequence
  Description of Artificial Sequence: Synthetic primer
gttttctcaacattaagcatt

SEQ ID NO: 812 - DNA, 19 bp, Artificial Sequence
  Description of Artificial Sequence: Synthetic primer
tctcccgatcaaattagaa

SEQ ID NO: 813 - DNA, 21 bp, Artificial Sequence
  Description of Artificial Sequence: Synthetic primer
cattggtgataaccttatctt

SEQ ID NO: 814 - DNA, 25 bp, Artificial Sequence
  Description of Artificial Sequence: Synthetic primer
aaagagataaaagattttgaaagaa

SEQ ID NO: 815 - DNA, 14 bp, Artificial Sequence
  Description of Artificial Sequence: Synthetic primer
tcctgcaccaagag

SEQ ID NO: 816 - DNA, 18 bp, Artificial Sequence
  Description of Artificial Sequence: Synthetic primer
aaagctaggtttttggag

SEQ ID NO: 817 - DNA, 20 bp, Artificial Sequence
  Description of Artificial Sequence: Synthetic primer
cttgtgataacgaagttttg

SEQ ID NO: 818 - DNA, 22 bp, Artificial Sequence
  Description of Artificial Sequence: Synthetic primer
acagaaaaagaagaagaattga

SEQ ID NO: 819 - DNA, 16 bp, Artificial Sequence
  Description of Artificial Sequence: Synthetic primer
catcaacatcggcatc

SEQ ID NO: 820 - DNA, 17 bp, Artificial Sequence
  Description of Artificial Sequence: Synthetic primer
atgatgctgggaatcag

SEQ ID NO: 821 - DNA, 20 bp, Artificial Sequence
  Description of Artificial Sequence: Synthetic primer
aagctaaaagcaaagttcta

SEQ ID NO: 822 - DNA, 14 bp, Artificial Sequence
  Description of Artificial Sequence: Synthetic primer
gggcttggacttga

SEQ ID NO: 823 - DNA, 25 bp, Artificial Sequence
  Description of Artificial Sequence: Synthetic primer
atatccattttcaattaaatctctc

SEQ ID NO: 824 - DNA, 20 bp, Artificial Sequence
  Description of Artificial Sequence: Synthetic primer
gtcttttaatgtgctaatgc

SEQ ID NO: 825 - DNA, 16 bp, Artificial Sequence
  Description of Artificial Sequence: Synthetic primer
taaagaggaggcatgg

SEQ ID NO: 826 - DNA, 19 bp, Artificial Sequence
  Description of Artificial Sequence: Synthetic primer
gcgttcctactaatgtatc

SEQ ID NO: 827 - DNA, 26 bp, Artificial Sequence
  Description of Artificial Sequence: Synthetic primer
aaaataataaatacgattgtcatact

SEQ ID NO: 828 - DNA, 24 bp, Artificial Sequence
  Description of Artificial Sequence: Synthetic primer
ggcagagttaaaatatatgaaaat

SEQ ID NO: 829 - DNA, 22 bp, Artificial Sequence
  Description of Artificial Sequence: Synthetic primer
ttgcgatttttagtttcaatag

SEQ ID NO: 830 - DNA, 19 bp, Artificial Sequence
  Description of Artificial Sequence: Synthetic primer
cacccttcaagaactttta

SEQ ID NO: 831 - DNA, 19 bp, Artificial Sequence
  Description of Artificial Sequence: Synthetic primer
caagccctttatatctctg

SEQ ID NO: 832 - DNA, 20 bp, Artificial Sequence
  Description of Artificial Sequence: Synthetic primer
ataccaaatatgagcaactg

SEQ ID NO: 833 - DNA, 12 bp, Artificial Sequence
  Description of Artificial Sequence: Synthetic primer
cgacttaccgac

SEQ ID NO: 834 - DNA, 12 bp, Artificial Sequence
  Description of Artificial Sequence: Synthetic primer
tgtcggtaagtc

SEQ ID NO: 835 - DNA, 12 bp, Artificial Sequence
  Description of Artificial Sequence: Synthetic primer
tatatcrgcgat

SEQ ID NO: 836 - DNA, 12 bp, Artificial Sequence
  Description of Artificial Sequence: Synthetic primer
aatcgcygatat

SEQ ID NO: 837 - DNA, 12 bp, Artificial Sequence
  Description of Artificial Sequence: Synthetic primer
tatatcgactta

SEQ ID NO: 838 - DNA, 12 bp, Artificial Sequence
  Description of Artificial Sequence: Synthetic primer
tatcggcgattt

SEQ ID NO: 839 - DNA, 12 bp, Artificial Sequence
  Description of Artificial Sequence: Synthetic primer
taacgaaagaag

SEQ ID NO: 840 - DNA, 12 bp, Artificial Sequence
  Description of Artificial Sequence: Synthetic primer
aaatcgttgata

SEQ ID NO: 841 - DNA, 11 bp, Artificial Sequence
  Description of Artificial Sequence: Synthetic primer
ttgtcggtaag

SEQ ID NO: 842 - DNA, 12 bp, Artificial Sequence
  Description of Artificial Sequence: Synthetic primer
atcarcgatttt

SEQ ID NO: 843 - DNA, 11 bp, Artificial Sequence
  Description of Artificial Sequence: Synthetic primer
tagaagaagcg

SEQ ID NO: 844 - DNA, 12 bp, Artificial Sequence
  Description of Artificial Sequence: Synthetic primer
ttctttcgttaa

SEQ ID NO: 845 - DNA, 12 bp, Artificial Sequence
  Description of Artificial Sequence: Synthetic primer
gattaaagtttc

SEQ ID NO: 846 - DNA, 12 bp, Artificial Sequence
  Description of Artificial Sequence: Synthetic primer
taaagtgaaact

SEQ ID NO: 847 - DNA, 12 bp, Artificial Sequence
  Description of Artificial Sequence: Synthetic primer
ctttcgcttctt

SEQ ID NO: 848 - DNA, 12 bp, Artificial Sequence
  Description of Artificial Sequence: Synthetic primer
gaagaagcgaaa

SEQ ID NO: 849 - DNA, 12 bp, Artificial Sequence
  Description of Artificial Sequence: Synthetic primer
ctgattaaagtt

SEQ ID NO: 850 - DNA, 11 bp, Artificial Sequence
  Description of Artificial Sequence: Synthetic primer
tacgaaagaag

SEQ ID NO: 851 - DNA, 11 bp, Artificial Sequence
  Description of Artificial Sequence: Synthetic primer
ttaacgaaaga

SEQ ID NO: 852 - DNA, 11 bp, Artificial Sequence
  Description of Artificial Sequence: Synthetic primer
cttctttcgga

SEQ ID NO: 853 - DNA, 10 bp, Artificial Sequence
  Description of Artificial Sequence: Synthetic primer
tctttcgcta

SEQ ID NO: 854 - DNA, 11 bp, Artificial Sequence
  Description of Artificial Sequence: Synthetic primer
gcgaaagaagc

SEQ ID NO: 855 - DNA, 12 bp, Artificial Sequence
  Description of Artificial Sequence: Synthetic primer
aacgaaagaaga

SEQ ID NO: 856 - DNA, 10 bp, Artificial Sequence
  Description of Artificial Sequence: Synthetic primer
accgataata

SEQ ID NO: 857 - DNA, 10 bp, Artificial Sequence
  Description of Artificial Sequence: Synthetic primer
tcttctaacg

SEQ ID NO: 858 - DNA, 8 bp, Artificial Sequence
  Description of Artificial Sequence: Synthetic primer
aatcgcta

SEQ ID NO: 859 - DNA, 8 bp, Artificial Sequence
  Description of Artificial Sequence: Synthetic primer
tattcgct

SEQ ID NO: 860 - DNA, 8 bp, Artificial Sequence
  Description of Artificial Sequence: Synthetic primer
taccgtta

SEQ ID NO: 861 - DNA, 8 bp, Artificial Sequence
  Description of Artificial Sequence: Synthetic primer
attaacgc

SEQ ID NO: 862 - DNA, 8 bp, Artificial Sequence
  Description of Artificial Sequence: Synthetic primer
tattagcg

SEQ ID NO: 863 - DNA, 8 bp, Artificial Sequence
  Description of Artificial Sequence: Synthetic primer
atcatacg

SEQ ID NO: 864 - DNA, 8 bp, Artificial Sequence
  Description of Artificial Sequence: Synthetic primer
gcgtaata

SEQ ID NO: 865 - DNA, 10 bp, Artificial Sequence
  Description of Artificial Sequence: Synthetic primer
aaaagaatta

SEQ ID NO: 866 - DNA, 8 bp, Artificial Sequence
  Description of Artificial Sequence: Synthetic primer
ctatcgta

SEQ ID NO: 867 - DNA, 10 bp, Artificial Sequence
  Description of Artificial Sequence: Synthetic primer
ttcttttata

SEQ ID NO: 868 - DNA, 8 bp, Artificial Sequence
  Description of Artificial Sequence: Synthetic primer
tccgctaa

SEQ ID NO: 869 - DNA, 10 bp, Artificial Sequence
  Description of Artificial Sequence: Synthetic primer
cttttttcat

SEQ ID NO: 870 - DNA, 9 bp, Artificial Sequence
  Description of Artificial Sequence: Synthetic primer
aacgaataa

SEQ ID NO: 871 - DNA, 10 bp, Artificial Sequence
  Description of Artificial Sequence: Synthetic primer
atataaaaga

SEQ ID NO: 872 - DNA, 11 bp, Artificial Sequence
  Description of Artificial Sequence: Synthetic primer
agaagcgatga

SEQ ID NO: 873 - DNA, 12 bp, Artificial Sequence
  Description of Artificial Sequence: Synthetic primer
cttcttctttcg

SEQ ID NO: 874 - DNA, 10 bp, Artificial Sequence
  Description of Artificial Sequence: Synthetic primer
ttacgaaaga

SEQ ID NO: 875 - DNA, 10 bp, Artificial Sequence
  Description of Artificial Sequence: Synthetic primer
tccgaaagaa

SEQ ID NO: 876 - DNA, 10 bp, Artificial Sequence
  Description of Artificial Sequence: Synthetic primer
gcttctttcg

SEQ ID NO: 877 - DNA, 11 bp, Artificial Sequence
  Description of Artificial Sequence: Synthetic primer
tgttctttcgt

SEQ ID NO: 878 - DNA, 10 bp, Artificial Sequence
  Description of Artificial Sequence: Synthetic primer
ttctttcgca

SEQ ID NO: 879 - DNA, 10 bp, Artificial Sequence
  Description of Artificial Sequence: Synthetic primer
cttctttcgc

SEQ ID NO: 880 - DNA, 10 bp, Artificial Sequence
  Description of Artificial Sequence: Synthetic primer
gatacgaaag

SEQ ID NO: 881 - DNA, 10 bp, Artificial Sequence
  Description of Artificial Sequence: Synthetic primer
ttattatcgg

SEQ ID NO: 882 - DNA, 10 bp, Artificial Sequence
  Description of Artificial Sequence: Synthetic primer
tacgaatgat

SEQ ID NO: 883 - DNA, 11 bp, Artificial Sequence
  Description of Artificial Sequence: Synthetic primer
agcgaaagaag

SEQ ID NO: 884 - DNA, 11 bp, Artificial Sequence
  Description of Artificial Sequence: Synthetic primer
aagaagcgaag

SEQ ID NO: 885 - DNA, 10 bp, Artificial Sequence
  Description of Artificial Sequence: Synthetic primer
tcgttacaat

SEQ ID NO: 886 - DNA, 10 bp, Artificial Sequence
  Description of Artificial Sequence: Synthetic primer
tttcgtatat

SEQ ID NO: 887 - DNA, 10 bp, Artificial Sequence
  Description of Artificial Sequence: Synthetic primer
caccaattac

SEQ ID NO: 888 - DNA, 10 bp, Artificial Sequence
  Description of Artificial Sequence: Synthetic primer
ctttttcgta

SEQ ID NO: 889 - DNA, 10 bp, Artificial Sequence
  Description of Artificial Sequence: Synthetic primer
tgaaaaagcg

SEQ ID NO: 890 - DNA, 11 bp, Artificial Sequence
  Description of Artificial Sequence: Synthetic primer
tgcgaaagaaa

SEQ ID NO: 891 - DNA, 12 bp, Artificial Sequence
  Description of Artificial Sequence: Synthetic primer
attgaaaaagca

SEQ ID NO: 892 - DNA, 12 bp, Artificial Sequence
  Description of Artificial Sequence: Synthetic primer
gcaattgaaaaa

SEQ ID NO: 893 - DNA, 9 bp, Artificial Sequence
  Description of Artificial Sequence: Synthetic primer
catataacg

SEQ ID NO: 894 - DNA, 10 bp, Artificial Sequence
  Description of Artificial Sequence: Synthetic primer
aatcgtttca

SEQ ID NO: 895 - DNA, 10 bp, Artificial Sequence
  Description of Artificial Sequence: Synthetic primer
tawtacgaaa

SEQ ID NO: 896 - DNA, 10 bp, Artificial Sequence
  Description of Artificial Sequence: Synthetic primer
aacgaaagat

SEQ ID NO: 897 - DNA, 8 bp, Artificial Sequence
  Description of Artificial Sequence: Synthetic primer
cgtataac

SEQ ID NO: 898 - DNA, 10 bp, Artificial Sequence
  Description of Artificial Sequence: Synthetic primer
taatgaagaa

SEQ ID NO: 899 - DNA, 9 bp, Artificial Sequence
  Description of Artificial Sequence: Synthetic primer
ttctttacg

SEQ ID NO: 900 - DNA, 10 bp, Artificial Sequence
  Description of Artificial Sequence: Synthetic primer
aaaacaattg

SEQ ID NO: 901 - DNA, 9 bp, Artificial Sequence
  Description of Artificial Sequence: Synthetic primer
taacggaaa

SEQ ID NO: 902 - DNA, 10 bp, Artificial Sequence
  Description of Artificial Sequence: Synthetic primer
ctttttyatc

SEQ ID NO: 903 - DNA, 10 bp, Artificial Sequence
  Description of Artificial Sequence: Synthetic primer
attatatgaa

SEQ ID NO: 904 - DNA, 9 bp, Artificial Sequence
  Description of Artificial Sequence: Synthetic primer
attacgtta

SEQ ID NO: 905 - DNA, 10 bp, Artificial Sequence
  Description of Artificial Sequence: Synthetic primer
tcttcaatat

SEQ ID NO: 906 - DNA, 9 bp, Artificial Sequence
  Description of Artificial Sequence: Synthetic primer
acgaagcaa

SEQ ID NO: 907 - DNA, 10 bp, Artificial Sequence
  Description of Artificial Sequence: Synthetic primer
caacttcttt

SEQ ID NO: 908 - DNA, 10 bp, Artificial Sequence
  Description of Artificial Sequence: Synthetic primer
aaaaggtgaa

SEQ ID NO: 909 - DNA, 9 bp, Artificial Sequence
  Description of Artificial Sequence: Synthetic primer
cggtttaat

SEQ ID NO: 910 - DNA, 9 bp, Artificial Sequence
  Description of Artificial Sequence: Synthetic primer
attgtcgtt

SEQ ID NO: 911 - DNA, 10 bp, Artificial Sequence
  Description of Artificial Sequence: Synthetic primer
aatcgcaatt

SEQ ID NO: 912 - DNA, 10 bp, Artificial Sequence
  Description of Artificial Sequence: Synthetic primer
caccaattgt

SEQ ID NO: 913 - DNA, 10 bp, Artificial Sequence
  Description of Artificial Sequence: Synthetic primer
tgaagcgatt

SEQ ID NO: 914 - DNA, 10 bp, Artificial Sequence
  Description of Artificial Sequence: Synthetic primer
ttcacgaata

SEQ ID NO: 915 - DNA, 10 bp, Artificial Sequence
  Description of Artificial Sequence: Synthetic primer
gaaacgattg

SEQ ID NO: 916 - DNA, 11 bp, Artificial Sequence
  Description of Artificial Sequence: Synthetic primer
tcaattgcttc

SEQ ID NO: 917 - DNA, 11 bp, Artificial Sequence
  Description of Artificial Sequence: Synthetic primer
caccttttaca

SEQ ID NO: 918 - DNA, 11 bp, Artificial Sequence
  Description of Artificial Sequence: Synthetic primer
gaagaagtagc

SEQ ID NO: 919 - DNA, 11 bp, Artificial Sequence
  Description of Artificial Sequence: Synthetic primer
tcttttttcgc

SEQ ID NO: 920 - DNA, 9 bp, Artificial Sequence
  Description of Artificial Sequence: Synthetic primer
twacgattg

SEQ ID NO: 921 - DNA, 9 bp, Artificial Sequence
  Description of Artificial Sequence: Synthetic primer
tagaagcga

SEQ ID NO: 922 - DNA, 10 bp, Artificial Sequence
  Description of Artificial Sequence: Synthetic primer
tagaagaagt

SEQ ID NO: 923 - DNA, 10 bp, Artificial Sequence
  Description of Artificial Sequence: Synthetic primer
caattggaat

SEQ ID NO: 924 - DNA, 10 bp, Artificial Sequence
  Description of Artificial Sequence: Synthetic primer
ttgtaattgg

SEQ ID NO: 925 - DNA, 10 bp, Artificial Sequence
  Description of Artificial Sequence: Synthetic primer
aaataacgat

SEQ ID NO: 926 - DNA, 10 bp, Artificial Sequence
  Description of Artificial Sequence: Synthetic primer
ctttcgcttt

SEQ ID NO: 927 - DNA, 10 bp, Artificial Sequence
  Description of Artificial Sequence: Synthetic primer
tcgctttatt

SEQ ID NO: 928 - DNA, 10 bp, Artificial Sequence
  Description of Artificial Sequence: Synthetic primer
tttcgttata

SEQ ID NO: 929 - DNA, 10 bp, Artificial Sequence
  Description of Artificial Sequence: Synthetic primer
tttwtcgtaa

SEQ ID NO: 930 - DNA, 10 bp, Artificial Sequence
  Description of Artificial Sequence: Synthetic primer
cgataaagaa

SEQ ID NO: 931 - DNA, 10 bp, Artificial Sequence
  Description of Artificial Sequence: Synthetic primer
attacgataa

SEQ ID NO: 932 - DNA, 10 bp, Artificial Sequence
  Description of Artificial Sequence: Synthetic primer
atttatcgta

SEQ ID NO: 933 - DNA, 10 bp, Artificial Sequence
  Description of Artificial Sequence: Synthetic primer
cttcttcacg

SEQ ID NO: 934 - DNA, 10 bp, Artificial Sequence
  Description of Artificial Sequence: Synthetic primer
atattatcgt

SEQ ID NO: 935 - DNA, 11 bp, Artificial Sequence
  Description of Artificial Sequence: Synthetic primer
taaatcttcta

SEQ ID NO: 936 - DNA, 9 bp, Artificial Sequence
  Description of Artificial Sequence: Synthetic primer
acaacgatt

SEQ ID NO: 937 - DNA, 9 bp, Artificial Sequence
  Description of Artificial Sequence: Synthetic primer
cgttatgaa

SEQ ID NO: 938 - DNA, 10 bp, Artificial Sequence
  Description of Artificial Sequence: Synthetic primer
ttgcaattgc

SEQ ID NO: 939 - DNA, 10 bp, Artificial Sequence
  Description of Artificial Sequence: Synthetic primer
attgcttctt

SEQ ID NO: 940 - DNA, 10 bp, Artificial Sequence
  Description of Artificial Sequence: Synthetic primer
tacaatttca

SEQ ID NO: 941 - DNA, 10 bp, Artificial Sequence
  Description of Artificial Sequence: Synthetic primer
aaaaggtatt

SEQ ID NO: 942 - DNA, 10 bp, Artificial Sequence
  Description of Artificial Sequence: Synthetic primer
attacaaaag

SEQ ID NO: 943 - DNA, 10 bp, Artificial Sequence
  Description of Artificial Sequence: Synthetic primer
tctttatatg

SEQ ID NO: 944 - DNA, 10 bp, Artificial Sequence
  Description of Artificial Sequence: Synthetic primer
cttctgcaat

SEQ ID NO: 945 - DNA, 10 bp, Artificial Sequence
  Description of Artificial Sequence: Synthetic primer
tctactaatt

SEQ ID NO: 946 - DNA, 10 bp, Artificial Sequence
  Description of Artificial Sequence: Synthetic primer
aaaacgttta

SEQ ID NO: 947 - DNA, 10 bp, Artificial Sequence
  Description of Artificial Sequence: Synthetic primer
gttaattgaa

SEQ ID NO: 948 - DNA, 10 bp, Artificial Sequence
  Description of Artificial Sequence: Synthetic primer
attacttgta

SEQ ID NO: 949 - DNA, 10 bp, Artificial Sequence
  Description of Artificial Sequence: Synthetic primer
cttctatata

SEQ ID NO: 950 - DNA, 12 bp, Artificial Sequence
  Description of Artificial Sequence: Synthetic primer
gctttttttatt

SEQ ID NO: 951 - DNA, 12 bp, Artificial Sequence
  Description of Artificial Sequence: Synthetic primer
cttttaattctt

SEQ ID NO: 952 - DNA, 11 bp, Artificial Sequence
  Description of Artificial Sequence: Synthetic primer
catcaattgtt

SEQ ID NO: 953 - DNA, 11 bp, Artificial Sequence
  Description of Artificial Sequence: Synthetic primer
cgatataattt

SEQ ID NO: 954 - DNA, 12 bp, Artificial Sequence
  Description of Artificial Sequence: Synthetic primer
aagaagtaaaag

SEQ ID NO: 955 - DNA, 11 bp, Artificial Sequence
  Description of Artificial Sequence: Synthetic primer
cgctttttatt

SEQ ID NO: 956 - DNA, 8 bp, Artificial Sequence
  Description of Artificial Sequence: Synthetic primer
atccgtta

SEQ ID NO: 957 - DNA, 10 bp, Artificial Sequence
  Description of Artificial Sequence: Synthetic primer
cttctttaat

SEQ ID NO: 958 - DNA, 9 bp, Artificial Sequence
  Description of Artificial Sequence: Synthetic primer
tcattacga

SEQ ID NO: 959 - DNA, 9 bp, Artificial Sequence
  Description of Artificial Sequence: Synthetic primer
atgtaacga

SEQ ID NO: 960 - DNA, 9 bp, Artificial Sequence
  Description of Artificial Sequence: Synthetic primer
caatcgtat

SEQ ID NO: 961 - DNA, 9 bp, Artificial Sequence
  Description of Artificial Sequence: Synthetic primer
taaagcgtt

SEQ ID NO: 962 - DNA, 9 bp, Artificial Sequence
  Description of Artificial Sequence: Synthetic primer
ttcaatacg

SEQ ID NO: 963 - DNA, 9 bp, Artificial Sequence
  Description of Artificial Sequence: Synthetic primer
ttaacggaa

SEQ ID NO: 964 - DNA, 10 bp, Artificial Sequence
  Description of Artificial Sequence: Synthetic primer
gaagaagtaa

SEQ ID NO: 965 - DNA, 9 bp, Artificial Sequence
  Description of Artificial Sequence: Synthetic primer
cgttaattg

SEQ ID NO: 966 - DNA, 10 bp, Artificial Sequence
  Description of Artificial Sequence: Synthetic primer
tattgatgaa

SEQ ID NO: 967 - DNA, 10 bp, Artificial Sequence
  Description of Artificial Sequence: Synthetic primer
taacagaaga

SEQ ID NO: 968 - DNA, 9 bp, Artificial Sequence
  Description of Artificial Sequence: Synthetic primer
tatgtaacg

SEQ ID NO: 969 - DNA, 9 bp, Artificial Sequence
  Description of Artificial Sequence: Synthetic primer
cgattgaag

SEQ ID NO: 970 - DNA, 10 bp, Artificial Sequence
  Description of Artificial Sequence: Synthetic primer
ttagaagatg

SEQ ID NO: 971 - DNA, 10 bp, Artificial Sequence
  Description of Artificial Sequence: Synthetic primer
taattgcttc

SEQ ID NO: 972 - DNA, 10 bp, Artificial Sequence
  Description of Artificial Sequence: Synthetic primer
aacaccaatt

SEQ ID NO: 973 - DNA, 10 bp, Artificial Sequence
  Description of Artificial Sequence: Synthetic primer
tgtaaaaggt

SEQ ID NO: 974 - DNA, 10 bp, Artificial Sequence
  Description of Artificial Sequence: Synthetic primer
tccaattgaa

SEQ ID NO: 975 - DNA, 10 bp, Artificial Sequence
  Description of Artificial Sequence: Synthetic primer
tctacaatta

SEQ ID NO: 976 - DNA, 10 bp, Artificial Sequence
  Description of Artificial Sequence: Synthetic primer
cttccataat

SEQ ID NO: 977 - DNA, 10 bp, Artificial Sequence
  Description of Artificial Sequence: Synthetic primer
tcaattgcaa

SEQ ID NO: 978 - DNA, 10 bp, Artificial Sequence
  Description of Artificial Sequence: Synthetic primer
tcctgttaca

SEQ ID NO: 979 - DNA, 10 bp, Artificial Sequence
  Description of Artificial Sequence: Synthetic primer
gcaattgtat

SEQ ID NO: 980 - DNA, 10 bp, Artificial Sequence
  Description of Artificial Sequence: Synthetic primer
gatgaattag

SEQ ID NO: 981 - DNA, 11 bp, Artificial Sequence
  Description of Artificial Sequence: Synthetic primer
cttttgtaata

SEQ ID NO: 982 - DNA, 11 bp, Artificial Sequence
  Description of Artificial Sequence: Synthetic primer
aaatggtgaag

SEQ ID NO: 983 - DNA, 11 bp, Artificial Sequence
  Description of Artificial Sequence: Synthetic primer
tgaaacaattg

SEQ ID NO: 984 - DNA, 11 bp, Artificial Sequence
  Description of Artificial Sequence: Synthetic primer
taaagataatg

SEQ ID NO: 985 - DNA, 11 bp, Artificial Sequence
  Description of Artificial Sequence: Synthetic primer
tctttatattc

SEQ ID NO: 986 - DNA, 7 bp, Artificial Sequence
  Description of Artificial Sequence: Synthetic primer
tgcaacg

SEQ ID NO: 987 - DNA, 7 bp, Artificial Sequence
  Description of Artificial Sequence: Synthetic primer
tccgtat

SEQ ID NO: 988 - DNA, 7 bp, Artificial Sequence
  Description of Artificial Sequence: Synthetic primer
ccgcttt

SEQ ID NO: 989 - DNA, 10 bp, Artificial Sequence
  Description of Artificial Sequence: Synthetic primer
caattaatac

SEQ ID NO: 990 - DNA, 10 bp, Artificial Sequence
  Description of Artificial Sequence: Synthetic primer
attgaaacga

SEQ ID NO: 991 - DNA, 10 bp, Artificial Sequence
  Description of Artificial Sequence: Synthetic primer
attattatcg

SEQ ID NO: 992 - DNA, 10 bp, Artificial Sequence
  Description of Artificial Sequence: Synthetic primer
gcaattgttg

SEQ ID NO: 993 - DNA, 10 bp, Artificial Sequence
  Description of Artificial Sequence: Synthetic primer
ttcgtaaatt

SEQ ID NO: 994 - DNA, 10 bp, Artificial Sequence
  Description of Artificial Sequence: Synthetic primer
tgaaacgaat

SEQ ID NO: 995 - DNA, 10 bp, Artificial Sequence
  Description of Artificial Sequence: Synthetic primer
gctactttat

SEQ ID NO: 996 - DNA, 11 bp, Artificial Sequence
  Description of Artificial Sequence: Synthetic primer
gtattaaaaga

SEQ ID NO: 997 - DNA, 11 bp, Artificial Sequence
  Description of Artificial Sequence: Synthetic primer
tgcttcttcta

SEQ ID NO: 998 - DNA, 11 bp, Artificial Sequence
  Description of Artificial Sequence: Synthetic primer
taactcttctt

SEQ ID NO: 999 - DNA, 11 bp, Artificial Sequence
  Description of Artificial Sequence: Synthetic primer
tttattagatg

SEQ ID NO: 1000 - DNA, 11 bp, Artificial Sequence
  Description of Artificial Sequence: Synthetic primer
cgatttttcaa

SEQ ID NO: 1001 - DNA, 11 bp, Artificial Sequence
  Description of Artificial Sequence: Synthetic primer
attaaagatgg

SEQ ID NO: 1002 - DNA, 8 bp, Artificial Sequence
  Description of Artificial Sequence: Synthetic primer
taatamcg

SEQ ID NO: 1003 - DNA, 8 bp, Artificial Sequence
  Description of Artificial Sequence: Synthetic primer
taatcgya

SEQ ID NO: 1004 - DNA, 8 bp, Artificial Sequence
  Description of Artificial Sequence: Synthetic primer
cgtaatat

SEQ ID NO: 1005 - DNA, 8 bp, Artificial Sequence
  Description of Artificial Sequence: Synthetic primer
cttcgtaa

SEQ ID NO: 1006 - DNA, 8 bp, Artificial Sequence
  Description of Artificial Sequence: Synthetic primer
atgaagcg

SEQ ID NO: 1007 - DNA, 8 bp, Artificial Sequence
  Description of Artificial Sequence: Synthetic primer
catacgaa

SEQ ID NO: 1008 - DNA, 8 bp, Artificial Sequence
  Description of Artificial Sequence: Synthetic primer
atacggaa

SEQ ID NO: 1009 - DNA, 8 bp, Artificial Sequence
  Description of Artificial Sequence: Synthetic primer
ttccgtaa

SEQ ID NO: 1010 - DNA, 8 bp, Artificial Sequence
  Description of Artificial Sequence: Synthetic primer
atacgatg

SEQ ID NO: 1011 - DNA, 8 bp, Artificial Sequence
  Description of Artificial Sequence: Synthetic primer
tactcgtt

SEQ ID NO: 1012 - DNA, 8 bp, Artificial Sequence
  Description of Artificial Sequence: Synthetic primer
cggtaaat

SEQ ID NO: 1013 - DNA, 8 bp, Artificial Sequence
  Description of Artificial Sequence: Synthetic primer
tcgtattg

SEQ ID NO: 1014 - DNA, 7 bp, Artificial Sequence
  Description of Artificial Sequence: Synthetic primer
aagcgga

SEQ ID NO: 1015 - DNA, 7 bp, Artificial Sequence
  Description of Artificial Sequence: Synthetic primer
gattacg

SEQ ID NO: 1016 - DNA, 7 bp, Artificial Sequence
  Description of Artificial Sequence: Synthetic primer
cgataac

SEQ ID NO: 1017 - DNA, 7 bp, Artificial Sequence
  Description of Artificial Sequence: Synthetic primer
cggatat

SEQ ID NO: 1018 - DNA, 7 bp, Artificial Sequence
  Description of Artificial Sequence: Synthetic primer
atatgcg

SEQ ID NO: 1019 - DNA, 7 bp, Artificial Sequence
  Description of Artificial Sequence: Synthetic primer
gttcgta

SEQ ID NO: 1020 - DNA, 7 bp, Artificial Sequence
  Description of Artificial Sequence: Synthetic primer
cgcaata

SEQ ID NO: 1021 - DNA, 7 bp, Artificial Sequence
  Description of Artificial Sequence: Synthetic primer
cgatgta

SEQ ID NO: 1022 - DNA, 7 bp, Artificial Sequence
  Description of Artificial Sequence: Synthetic primer
gttgcga

SEQ ID NO: 1023 - DNA, 7 bp, Artificial Sequence
  Description of Artificial Sequence: Synthetic primer
tcgcata

SEQ ID NO: 1024 - DNA, 12 bp, Artificial Sequence
  Description of Artificial Sequence: Synthetic primer
aacgggctaccg

SEQ ID NO: 1025 - DNA, 12 bp, Artificial Sequence
  Description of Artificial Sequence: Synthetic primer
gtatcccggtag

SEQ ID NO: 1026 - DNA, 12 bp, Artificial Sequence
  Description of Artificial Sequence: Synthetic primer
cttacggcccgt

SEQ ID NO: 1027 - DNA, 12 bp, Artificial Sequence
  Description of Artificial Sequence: Synthetic primer
cccgtttacggg

SEQ ID NO: 1028 - DNA, 12 bp, Artificial Sequence
  Description of Artificial Sequence: Synthetic primer
tgttagggcgcg

SEQ ID NO: 1029 - DNA, 12 bp, Artificial Sequence
  Description of Artificial Sequence: Synthetic primer
ccctaacaggcg

SEQ ID NO: 1030 - DNA, 12 bp, Artificial Sequence
  Description of Artificial Sequence: Synthetic primer
gtacttcggcgc

SEQ ID NO: 1031 - DNA, 12 bp, Artificial Sequence
  Description of Artificial Sequence: Synthetic primer
cttataggcgca

SEQ ID NO: 1032 - DNA, 12 bp, Artificial Sequence
  Description of Artificial Sequence: Synthetic primer
tgcgccgaagta

SEQ ID NO: 1033 - DNA, 12 bp, Artificial Sequence
  Description of Artificial Sequence: Synthetic primer
gcgcctataagg

SEQ ID NO: 1034 - DNA, 12 bp, Artificial Sequence
  Description of Artificial Sequence: Synthetic primer
ccggcatagccg

SEQ ID NO: 1035 - DNA, 12 bp, Artificial Sequence
  Description of Artificial Sequence: Synthetic primer
ttgccagaccgc

SEQ ID NO: 1036 - DNA, 12 bp, Artificial Sequence
  Description of Artificial Sequence: Synthetic primer
agtgattcgggt

SEQ ID NO: 1037 - DNA, 12 bp, Artificial Sequence
  Description of Artificial Sequence: Synthetic primer
tgcggtctggca

SEQ ID NO: 1038 - DNA, 12 bp, Artificial Sequence
  Description of Artificial Sequence: Synthetic primer
tgccggaggata

SEQ ID NO: 1039 - DNA, 12 bp, Artificial Sequence
  Description of Artificial Sequence: Synthetic primer
gttccatcgggt

SEQ ID NO: 1040 - DNA, 12 bp, Artificial Sequence
  Description of Artificial Sequence: Synthetic primer
ctctcgatcccg

SEQ ID NO: 1041 - DNA, 12 bp, Artificial Sequence
  Description of Artificial Sequence: Synthetic primer
tactgaaccccc

SEQ ID NO: 1042 - DNA, 12 bp, Artificial Sequence
  Description of Artificial Sequence: Synthetic primer
gggtcagttata

SEQ ID NO: 1043 - DNA, 12 bp, Artificial Sequence
  Description of Artificial Sequence: Synthetic primer
atcctcaccgtt

SEQ ID NO: 1044 - DNA, 12 bp, Artificial Sequence
  Description of Artificial Sequence: Synthetic primer
gtcaataacctc

SEQ ID NO: 1045 - DNA, 12 bp, Artificial Sequence
  Description of Artificial Sequence: Synthetic primer
gtgaggataggc

SEQ ID NO: 1046 - DNA, 11 bp, Artificial Sequence
  Description of Artificial Sequence: Synthetic primer
gctatgccgga

SEQ ID NO: 1047 - DNA, 12 bp, Artificial Sequence
  Description of Artificial Sequence: Synthetic primer
tagctgggggtt

SEQ ID NO: 1048 - DNA, 12 bp, Artificial Sequence
  Description of Artificial Sequence: Synthetic primer
ggggtttgtcag

SEQ ID NO: 1049 - DNA, 11 bp, Artificial Sequence
  Description of Artificial Sequence: Synthetic primer
gtcatcggggt

SEQ ID NO: 1050 - DNA, 12 bp, Artificial Sequence
  Description of Artificial Sequence: Synthetic primer
aaacccccagct

SEQ ID NO: 1051 - DNA, 12 bp, Artificial Sequence
  Description of Artificial Sequence: Synthetic primer
agcatcagactg

SEQ ID NO: 1052 - DNA, 11 bp, Artificial Sequence
  Description of Artificial Sequence: Synthetic primer
acgctttactc

SEQ ID NO: 1053 - DNA, 12 bp, Artificial Sequence
  Description of Artificial Sequence: Synthetic primer
tgaggttattga

SEQ ID NO: 1054 - DNA, 12 bp, Artificial Sequence
  Description of Artificial Sequence: Synthetic primer
atgcttctggag

SEQ ID NO: 1055 - DNA, 10 bp, Artificial Sequence
  Description of Artificial Sequence: Synthetic primer
ccgcaatacc

SEQ ID NO: 1056 - DNA, 10 bp, Artificial Sequence
  Description of Artificial Sequence: Synthetic primer
taaccgccag

SEQ ID NO: 1057 - DNA, 10 bp, Artificial Sequence
  Description of Artificial Sequence: Synthetic primer
agcgattacc

SEQ ID NO: 1058 - DNA, 9 bp, Artificial Sequence
  Description of Artificial Sequence: Synthetic primer
cgccttgat

SEQ ID NO: 1059 - DNA, 9 bp, Artificial Sequence
  Description of Artificial Sequence: Synthetic primer
attggcggg

SEQ ID NO: 1060 - DNA, 9 bp, Artificial Sequence
  Description of Artificial Sequence: Synthetic primer
cagtaacgc

SEQ ID NO: 1061 - DNA, 9 bp, Artificial Sequence
  Description of Artificial Sequence: Synthetic primer
ttataacgg

SEQ ID NO: 1062 - DNA, 10 bp, Artificial Sequence
  Description of Artificial Sequence: Synthetic primer
ggcgattgcc

SEQ ID NO: 1063 - DNA, 10 bp, Artificial Sequence
  Description of Artificial Sequence: Synthetic primer
tatccagcgc

SEQ ID NO: 1064 - DNA, 10 bp, Artificial Sequence
  Description of Artificial Sequence: Synthetic primer
gcaataccgt

SEQ ID NO: 1065 - DNA, 10 bp, Artificial Sequence
  Description of Artificial Sequence: Synthetic primer
tcaggcgytg

SEQ ID NO: 1066 - DNA, 10 bp, Artificial Sequence
  Description of Artificial Sequence: Synthetic primer
gccggtattg

SEQ ID NO: 1067 - DNA, 10 bp, Artificial Sequence
  Description of Artificial Sequence: Synthetic primer
tgcgggtatt

SEQ ID NO: 1068 - DNA, 12 bp, Artificial Sequence
  Description of Artificial Sequence: Synthetic primer
ttacagttccat

SEQ ID NO: 1069 - DNA, 10 bp, Artificial Sequence
  Description of Artificial Sequence: Synthetic primer
caggcgttgg

SEQ ID NO: 1070 - DNA, 10 bp, Artificial Sequence
  Description of Artificial Sequence: Synthetic primer
tatctgccgt

SEQ ID NO: 1071 - DNA, 10 bp, Artificial Sequence
  Description of Artificial Sequence: Synthetic primer
ggcaacggta

SEQ ID NO: 1072 - DNA, 10 bp, Artificial Sequence
  Description of Artificial Sequence: Synthetic primer
tggcaatcgc

SEQ ID NO: 1073 - DNA, 10 bp, Artificial Sequence
  Description of Artificial Sequence: Synthetic primer
ttatccagcg

SEQ ID NO: 1074 - DNA, 10 bp, Artificial Sequence
  Description of Artificial Sequence: Synthetic primer
aataccgcca

SEQ ID NO: 1075 - DNA, 10 bp, Artificial Sequence
  Description of Artificial Sequence: Synthetic primer
atgaataccg

SEQ ID NO: 1076 - DNA, 10 bp, Artificial Sequence
  Description of Artificial Sequence: Synthetic primer
aacaggcgat

SEQ ID NO: 1077 - DNA, 10 bp, Artificial Sequence
  Description of Artificial Sequence: Synthetic primer
gccgccagtt

SEQ ID NO: 1078 - DNA, 10 bp, Artificial Sequence
  Description of Artificial Sequence: Synthetic primer
atcgctattg

SEQ ID NO: 1079 - DNA, 10 bp, Artificial Sequence
  Description of Artificial Sequence: Synthetic primer
atcgccgatg

SEQ ID NO: 1080 - DNA, 10 bp, Artificial Sequence
  Description of Artificial Sequence: Synthetic primer
cggcagattg

SEQ ID NO: 1081 - DNA, 10 bp, Artificial Sequence
  Description of Artificial Sequence: Synthetic primer
tcgccaccgg

SEQ ID NO: 1082 - DNA, 10 bp, Artificial Sequence
  Description of Artificial Sequence: Synthetic primer
attcgccacc

SEQ ID NO: 1083 - DNA, 10 bp, Artificial Sequence
  Description of Artificial Sequence: Synthetic primer
atccagcgcc

SEQ ID NO: 1084 - DNA, 10 bp, Artificial Sequence
  Description of Artificial Sequence: Synthetic primer
accgttgccg

SEQ ID NO: 1085 - DNA, 9 bp, Artificial Sequence
  Description of Artificial Sequence: Synthetic primer
ratacccgc

SEQ ID NO: 1086 - DNA, 10 bp, Artificial Sequence
  Description of Artificial Sequence: Synthetic primer
atcatcacgc

SEQ ID NO: 1087 - DNA, 10 bp, Artificial Sequence
  Description of Artificial Sequence: Synthetic primer
gatgcgttga

SEQ ID NO: 1088 - DNA, 10 bp, Artificial Sequence
  Description of Artificial Sequence: Synthetic primer
cggtgctgac

SEQ ID NO: 1089 - DNA, 10 bp, Artificial Sequence
  Description of Artificial Sequence: Synthetic primer
aaagtgcccg

SEQ ID NO: 1090 - DNA, 10 bp, Artificial Sequence
  Description of Artificial Sequence: Synthetic primer
catcaccggc

SEQ ID NO: 1091 - DNA, 10 bp, Artificial Sequence
  Description of Artificial Sequence: Synthetic primer
aaagctatcg

SEQ ID NO: 1092 - DNA, 10 bp, Artificial Sequence
  Description of Artificial Sequence: Synthetic primer
cggccaataa

SEQ ID NO: 1093 - DNA, 10 bp, Artificial Sequence
  Description of Artificial Sequence: Synthetic primer
agccagcgca

SEQ ID NO: 1094 - DNA, 10 bp, Artificial Sequence
  Description of Artificial Sequence: Synthetic primer
tttatccgca

SEQ ID NO: 1095 - DNA, 10 bp, Artificial Sequence
  Description of Artificial Sequence: Synthetic primer
atggcgctgg

SEQ ID NO: 1096 - DNA, 9 bp, Artificial Sequence
  Description of Artificial Sequence: Synthetic primer
cggtatcca

SEQ ID NO: 1097 - DNA, 9 bp, Artificial Sequence
  Description of Artificial Sequence: Synthetic primer
tatcsgtca

SEQ ID NO: 1098 - DNA, 9 bp, Artificial Sequence
  Description of Artificial Sequence: Synthetic primer
tgcgccata

SEQ ID NO: 1099 - DNA, 10 bp, Artificial Sequence
  Description of Artificial Sequence: Synthetic primer
tgaactggct

SEQ ID NO: 1100 - DNA, 10 bp, Artificial Sequence
  Description of Artificial Sequence: Synthetic primer
ctccggtggc

SEQ ID NO: 1101 - DNA, 9 bp, Artificial Sequence
  Description of Artificial Sequence: Synthetic primer
csaataccg

SEQ ID NO: 1102 - DNA, 9 bp, Artificial Sequence
  Description of Artificial Sequence: Synthetic primer
ggcggtwtt

SEQ ID NO: 1103 - DNA, 9 bp, Artificial Sequence
  Description of Artificial Sequence: Synthetic primer
caataccgg

SEQ ID NO: 1104 - DNA, 9 bp, Artificial Sequence
  Description of Artificial Sequence: Synthetic primer
ggcgatagc

SEQ ID NO: 1105 - DNA, 10 bp, Artificial Sequence
  Description of Artificial Sequence: Synthetic primer
tttatcgcca

SEQ ID NO: 1106 - DNA, 10 bp, Artificial Sequence
  Description of Artificial Sequence: Synthetic primer
ttgccgcctt

SEQ ID NO: 1107 - DNA, 9 bp, Artificial Sequence
  Description of Artificial Sequence: Synthetic primer
gatatcgcc

SEQ ID NO: 1108 - DNA, 9 bp, Artificial Sequence
  Description of Artificial Sequence: Synthetic primer
taccgccag

SEQ ID NO: 1109 - DNA, 9 bp, Artificial Sequence
  Description of Artificial Sequence: Synthetic primer
gcggttatc

SEQ ID NO: 1110 - DNA, 9 bp, Artificial Sequence
  Description of Artificial Sequence: Synthetic primer
ataaccgcc

SEQ ID NO: 1111 - DNA, 9 bp, Artificial Sequence
  Description of Artificial Sequence: Synthetic primer
tcgcgggca

SEQ ID NO: 1112 - DNA, 9 bp, Artificial Sequence
  Description of Artificial Sequence: Synthetic primer
cgatagcgg

SEQ ID NO: 1113 - DNA, 10 bp, Artificial Sequence
  Description of Artificial Sequence: Synthetic primer
ggcagatagc

SEQ ID NO: 1114 - DNA, 10 bp, Artificial Sequence
  Description of Artificial Sequence: Synthetic primer
tcatcaacgt

SEQ ID NO: 1115 - DNA, 10 bp, Artificial Sequence
  Description of Artificial Sequence: Synthetic primer
atcgccatca

SEQ ID NO: 1116 - DNA, 10 bp, Artificial Sequence
  Description of Artificial Sequence: Synthetic primer
ttgatgacgt

SEQ ID NO: 1117 - DNA, 9 bp, Artificial Sequence
  Description of Artificial Sequence: Synthetic primer
cgccaataa

SEQ ID NO: 1118 - DNA, 9 bp, Artificial Sequence
  Description of Artificial Sequence: Synthetic primer
taccggcaa

SEQ ID NO: 1119 - DNA, 9 bp, Artificial Sequence
  Description of Artificial Sequence: Synthetic primer
ataccggtg

SEQ ID NO: 1120 - DNA, 9 bp, Artificial Sequence
  Description of Artificial Sequence: Synthetic primer
atcacccgc

SEQ ID NO: 1121 - DNA, 9 bp, Artificial Sequence
  Description of Artificial Sequence: Synthetic primer
tttdgccgc

SEQ ID NO: 1122 - DNA, 9 bp, Artificial Sequence
  Description of Artificial Sequence: Synthetic primer
tattrccgc

SEQ ID NO: 1123 - DNA, 9 bp, Artificial Sequence
  Description of Artificial Sequence: Synthetic primer
gcgatagcg

SEQ ID NO: 1124 - DNA, 10 bp, Artificial Sequence
  Description of Artificial Sequence: Synthetic primer
tcaatattgg

SEQ ID NO: 1125 - DNA, 9 bp, Artificial Sequence
  Description of Artificial Sequence: Synthetic primer
gtaataccg

SEQ ID NO: 1126 - DNA, 9 bp, Artificial Sequence
  Description of Artificial Sequence: Synthetic primer
cgtaatgcg

SEQ ID NO: 1127 - DNA, 9 bp, Artificial Sequence
  Description of Artificial Sequence: Synthetic primer
gctaaccgc

SEQ ID NO: 1128 - DNA, 9 bp, Artificial Sequence
  Description of Artificial Sequence: Synthetic primer
gcgggtaac

SEQ ID NO: 1129 - DNA, 9 bp, Artificial Sequence
  Description of Artificial Sequence: Synthetic primer
tggcgatca

SEQ ID NO: 1130 - DNA, 9 bp, Artificial Sequence
  Description of Artificial Sequence: Synthetic primer
cgccagcgc

SEQ ID NO: 1131 - DNA, 9 bp, Artificial Sequence
  Description of Artificial Sequence: Synthetic primer
ttgatcgcc

SEQ ID NO: 1132 - DNA, 9 bp, Artificial Sequence
  Description of Artificial Sequence: Synthetic primer
tgccggtaa

SEQ ID NO: 1133 - DNA, 9 bp, Artificial Sequence
  Description of Artificial Sequence: Synthetic primer
cagcggtaa

SEQ ID NO: 1134 - DNA, 8 bp, Artificial Sequence
  Description of Artificial Sequence: Synthetic primer
atggcggc

SEQ ID NO: 1135 - DNA, 8 bp, Artificial Sequence
  Description of Artificial Sequence: Synthetic primer
tagcgggt

SEQ ID NO: 1136 - DNA, 8 bp, Artificial Sequence
  Description of Artificial Sequence: Synthetic primer
gtacccgc

SEQ ID NO: 1137 - DNA, 8 bp, Artificial Sequence
  Description of Artificial Sequence: Synthetic primer
cgtaccgg

SEQ ID NO: 1138 - DNA, 9 bp, Artificial Sequence
  Description of Artificial Sequence: Synthetic primer
aacccgcca

SEQ ID NO: 1139 - DNA, 9 bp, Artificial Sequence
  Description of Artificial Sequence: Synthetic primer
gcgatgacc

SEQ ID NO: 1140 - DNA, 9 bp, Artificial Sequence
  Description of Artificial Sequence: Synthetic primer
cccgccagt

SEQ ID NO: 1141 - DNA, 9 bp, Artificial Sequence
  Description of Artificial Sequence: Synthetic primer
agtatgacg

SEQ ID NO: 1142 - DNA, 9 bp, Artificial Sequence
  Description of Artificial Sequence: Synthetic primer
gccctgacg

SEQ ID NO: 1143 - DNA, 9 bp, Artificial Sequence
  Description of Artificial Sequence: Synthetic primer
cggtaaagc

SEQ ID NO: 1144 - DNA, 9 bp, Artificial Sequence
  Description of Artificial Sequence: Synthetic primer
gccgctatt

SEQ ID NO: 1145 - DNA, 9 bp, Artificial Sequence
  Description of Artificial Sequence: Synthetic primer
ccaatgcgg

SEQ ID NO: 1146 - DNA, 9 bp, Artificial Sequence
  Description of Artificial Sequence: Synthetic primer
ctgacggcg

SEQ ID NO: 1147 - DNA, 9 bp, Artificial Sequence
  Description of Artificial Sequence: Synthetic primer
cattacccg

SEQ ID NO: 1148 - DNA, 9 bp, Artificial Sequence
  Description of Artificial Sequence: Synthetic primer
taccggtat

SEQ ID NO: 1149 - DNA, 9 bp, Artificial Sequence
  Description of Artificial Sequence: Synthetic primer
rccggttat

SEQ ID NO: 1150 - DNA, 9 bp, Artificial Sequence
  Description of Artificial Sequence: Synthetic primer
ccgataacc

SEQ ID NO: 1151 - DNA, 9 bp, Artificial Sequence
  Description of Artificial Sequence: Synthetic primer
cgtttagcg

SEQ ID NO: 1152 - DNA, 10 bp, Artificial Sequence
  Description of Artificial Sequence: Synthetic primer
atttttaccg

SEQ ID NO: 1153 - DNA, 9 bp, Artificial Sequence
  Description of Artificial Sequence: Synthetic primer
cgccagcaa

SEQ ID NO: 1154 - DNA, 9 bp, Artificial Sequence
  Description of Artificial Sequence: Synthetic primer
attggcgtt

SEQ ID NO: 1155 - DNA, 9 bp, Artificial Sequence
  Description of Artificial Sequence: Synthetic primer
gccgctgat

SEQ ID NO: 1156 - DNA, 9 bp, Artificial Sequence
  Description of Artificial Sequence: Synthetic primer
mactggcgc

SEQ ID NO: 1157 - DNA, 9 bp, Artificial Sequence
  Description of Artificial Sequence: Synthetic primer
gccgcttta

SEQ ID NO: 1158 - DNA, 9 bp, Artificial Sequence
  Description of Artificial Sequence: Synthetic primer
tcggtattg

SEQ ID NO: 1159 - DNA, 9 bp, Artificial Sequence
  Description of Artificial Sequence: Synthetic primer
attaccggt

SEQ ID NO: 1160 - DNA, 9 bp, Artificial Sequence
  Description of Artificial Sequence: Synthetic primer
tatcggcat

SEQ ID NO: 1161 - DNA, 9 bp, Artificial Sequence
  Description of Artificial Sequence: Synthetic primer
aatctgscg

SEQ ID NO: 1162 - DNA, 9 bp, Artificial Sequence
  Description of Artificial Sequence: Synthetic primer
ccaatrgcg

SEQ ID NO: 1163 - DNA, 9 bp, Artificial Sequence
  Description of Artificial Sequence: Synthetic primer
cggtaatat

SEQ ID NO: 1164 - DNA, 9 bp, Artificial Sequence
  Description of Artificial Sequence: Synthetic primer
gcggtaatg

SEQ ID NO: 1165 - DNA, 9 bp, Artificial Sequence
  Description of Artificial Sequence: Synthetic primer
gataaccgt

SEQ ID NO: 1166 - DNA, 9 bp, Artificial Sequence
  Description of Artificial Sequence: Synthetic primer
ctggcgcgg

SEQ ID NO: 1167 - DNA, 9 bp, Artificial Sequence
  Description of Artificial Sequence: Synthetic primer
agataaccg

SEQ ID NO: 1168 - DNA, 9 bp, Artificial Sequence
  Description of Artificial Sequence: Synthetic primer
ccgtattga

SEQ ID NO: 1169 - DNA, 9 bp, Artificial Sequence
  Description of Artificial Sequence: Synthetic primer
cgatatccc

SEQ ID NO: 1170 - DNA, 9 bp, Artificial Sequence
  Description of Artificial Sequence: Synthetic primer
cgctgatcg

SEQ ID NO: 1171 - DNA, 9 bp, Artificial Sequence
  Description of Artificial Sequence: Synthetic primer
gcccgatgg

SEQ ID NO: 1172 - DNA, 8 bp, Artificial Sequence
  Description of Artificial Sequence: Synthetic primer
gcgtaccg

SEQ ID NO: 1173 - DNA, 9 bp, Artificial Sequence
  Description of Artificial Sequence: Synthetic primer
gccaataac

SEQ ID NO: 1174 - DNA, 9 bp, Artificial Sequence
  Description of Artificial Sequence: Synthetic primer
aaaataccg

SEQ ID NO: 1175 - DNA, 9 bp, Artificial Sequence
  Description of Artificial Sequence: Synthetic primer
tggcgatgg

SEQ ID NO: 1176 - DNA, 9 bp, Artificial Sequence
  Description of Artificial Sequence: Synthetic primer
gtaacgcca

SEQ ID NO: 1177 - DNA, 9 bp, Artificial Sequence
  Description of Artificial Sequence: Synthetic primer
ggtaacggc

SEQ ID NO: 1178 - DNA, 9 bp, Artificial Sequence
  Description of Artificial Sequence: Synthetic primer
gtttaccgc

SEQ ID NO: 1179 - DNA, 8 bp, Artificial Sequence
  Description of Artificial Sequence: Synthetic primer
taatgcgg

SEQ ID NO: 1180 - DNA, 8 bp, Artificial Sequence
  Description of Artificial Sequence: Synthetic primer
cgataccc

SEQ ID NO: 1181 - DNA, 8 bp, Artificial Sequence
  Description of Artificial Sequence: Synthetic primer
taccgggc

SEQ ID NO: 1182 - DNA, 9 bp, Artificial Sequence
  Description of Artificial Sequence: Synthetic primer
ggcgatgat

SEQ ID NO: 1183 - DNA, 9 bp, Artificial Sequence
  Description of Artificial Sequence: Synthetic primer
atgccgatg

SEQ ID NO: 1184 - DNA, 9 bp, Artificial Sequence
  Description of Artificial Sequence: Synthetic primer
gctggcgca

SEQ ID NO: 1185 - DNA, 9 bp, Artificial Sequence
  Description of Artificial Sequence: Synthetic primer
atcgccacc

SEQ ID NO: 1186 - DNA, 9 bp, Artificial Sequence
  Description of Artificial Sequence: Synthetic primer
gcggctgaa

SEQ ID NO: 1187 - DNA, 9 bp, Artificial Sequence
  Description of Artificial Sequence: Synthetic primer
tcatcggca

SEQ ID NO: 1188 - DNA, 9 bp, Artificial Sequence
  Description of Artificial Sequence: Synthetic primer
gttggcggc

SEQ ID NO: 1189 - DNA, 9 bp, Artificial Sequence
  Description of Artificial Sequence: Synthetic primer
gcgctgttg

SEQ ID NO: 1190 - DNA, 9 bp, Artificial Sequence
  Description of Artificial Sequence: Synthetic primer
aatggcggt

SEQ ID NO: 1191 - DNA, 9 bp, Artificial Sequence
  Description of Artificial Sequence: Synthetic primer
cgctttatc

SEQ ID NO: 1192 - DNA, 9 bp, Artificial Sequence
  Description of Artificial Sequence: Synthetic primer
cacggtatt

SEQ ID NO: 1193 - DNA, 9 bp, Artificial Sequence
  Description of Artificial Sequence: Synthetic primer
ttggccgca

SEQ ID NO: 1194 - DNA, 9 bp, Artificial Sequence
  Description of Artificial Sequence: Synthetic primer
ttgcccgcc

SEQ ID NO: 1195 - DNA, 9 bp, Artificial Sequence
  Description of Artificial Sequence: Synthetic primer
gataaaccg

SEQ ID NO: 1196 - DNA, 9 bp, Artificial Sequence
  Description of Artificial Sequence: Synthetic primer
tcaccgata

SEQ ID NO: 1197 - DNA, 9 bp, Artificial Sequence
  Description of Artificial Sequence: Synthetic primer
aaccggtaa

SEQ ID NO: 1198 - DNA, 9 bp, Artificial Sequence
  Description of Artificial Sequence: Synthetic primer
tgcggatat

SEQ ID NO: 1199 - DNA, 9 bp, Artificial Sequence
  Description of Artificial Sequence: Synthetic primer
gaaccggtg

SEQ ID NO: 1200 - DNA, 9 bp, Artificial Sequence
  Description of Artificial Sequence: Synthetic primer
atttacccg

SEQ ID NO: 1201 - DNA, 9 bp, Artificial Sequence
  Description of Artificial Sequence: Synthetic primer
ctggcgaat

SEQ ID NO: 1202 - DNA, 9 bp, Artificial Sequence
  Description of Artificial Sequence: Synthetic primer
accggcatc

SEQ ID NO: 1203 - DNA, 9 bp, Artificial Sequence
  Description of Artificial Sequence: Synthetic primer
ttaccgtca

SEQ ID NO: 1204 - DNA, 9 bp, Artificial Sequence
  Description of Artificial Sequence: Synthetic primer
ggccgttgg

SEQ ID NO: 1205 - DNA, 9 bp, Artificial Sequence
  Description of Artificial Sequence: Synthetic primer
cactggcgt

SEQ ID NO: 1206 - DNA, 9 bp, Artificial Sequence
  Description of Artificial Sequence: Synthetic primer
gcgttgata

SEQ ID NO: 1207 - DNA, 9 bp, Artificial Sequence
  Description of Artificial Sequence: Synthetic primer
cataacgca

SEQ ID NO: 1208 - DNA, 9 bp, Artificial Sequence
  Description of Artificial Sequence: Synthetic primer
aatgcccgc

SEQ ID NO: 1209 - DNA, 9 bp, Artificial Sequence
  Description of Artificial Sequence: Synthetic primer
ggtgaccgc

SEQ ID NO: 1210 - DNA, 9 bp, Artificial Sequence
  Description of Artificial Sequence: Synthetic primer
tggctggcg

SEQ ID NO: 1211 - DNA, 9 bp, Artificial Sequence
  Description of Artificial Sequence: Synthetic primer
cgaacgttt

SEQ ID NO: 1212 - DNA, 12 bp, Artificial Sequence
  Description of Artificial Sequence: Synthetic primer
tagagcggttcc

SEQ ID NO: 1213 - DNA, 12 bp, Artificial Sequence
  Description of Artificial Sequence: Synthetic primer
cggaaccgctct

SEQ ID NO: 1214 - DNA, 12 bp, Artificial Sequence
  Description of Artificial Sequence: Synthetic primer
gcgcatcccgaa

SEQ ID NO: 1215 - DNA, 12 bp, Artificial Sequence
  Description of Artificial Sequence: Synthetic primer
ttagagcggttc

SEQ ID NO: 1216 - DNA, 12 bp, Artificial Sequence
  Description of Artificial Sequence: Synthetic primer
aaagtgcgaagc

SEQ ID NO: 1217 - DNA, 11 bp, Artificial Sequence
  Description of Artificial Sequence: Synthetic primer
gaaccgctcta

SEQ ID NO: 1218 - DNA, 12 bp, Artificial Sequence
  Description of Artificial Sequence: Synthetic primer
ccggaaccgctc

SEQ ID NO: 1219 - DNA, 12 bp, Artificial Sequence
  Description of Artificial Sequence: Synthetic primer
cacttttcggga

SEQ ID NO: 1220 - DNA, 12 bp, Artificial Sequence
  Description of Artificial Sequence: Synthetic primer
cgtttcacactt

SEQ ID NO: 1221 - DNA, 11 bp, Artificial Sequence
  Description of Artificial Sequence: Synthetic primer
sgcgcttgccg

SEQ ID NO: 1222 - DNA, 11 bp, Artificial Sequence
  Description of Artificial Sequence: Synthetic primer
gcgccgatctg

SEQ ID NO: 1223 - DNA, 11 bp, Artificial Sequence
  Description of Artificial Sequence: Synthetic primer
gcgcttgccga

SEQ ID NO: 1224 - DNA, 11 bp, Artificial Sequence
  Description of Artificial Sequence: Synthetic primer
gcggcaagcgc

SEQ ID NO: 1225 - DNA, 11 bp, Artificial Sequence
  Description of Artificial Sequence: Synthetic primer
cgccggaaagc

SEQ ID NO: 1226 - DNA, 11 bp, Artificial Sequence
  Description of Artificial Sequence: Synthetic primer
cggcaaggcgc

SEQ ID NO: 1227 - DNA, 11 bp, Artificial Sequence
  Description of Artificial Sequence: Synthetic primer
cgatattgccg

SEQ ID NO: 1228 - DNA, 11 bp, Artificial Sequence
  Description of Artificial Sequence: Synthetic primer
gcttcgcactt

SEQ ID NO: 1229 - DNA, 12 bp, Artificial Sequence
  Description of Artificial Sequence: Synthetic primer
tgaaacggtttt

SEQ ID NO: 1230 - DNA, 11 bp, Artificial Sequence
  Description of Artificial Sequence: Synthetic primer
gcgcgcaaggc

SEQ ID NO: 1231 - DNA, 11 bp, Artificial Sequence
  Description of Artificial Sequence: Synthetic primer
gcgccagcgca

SEQ ID NO: 1232 - DNA, 11 bp, Artificial Sequence
  Description of Artificial Sequence: Synthetic primer
gccgatctgat

SEQ ID NO: 1233 - DNA, 11 bp, Artificial Sequence
  Description of Artificial Sequence: Synthetic primer
gccgatgcgct

SEQ ID NO: 1234 - DNA, 11 bp, Artificial Sequence
  Description of Artificial Sequence: Synthetic primer
gccggaaagcg

SEQ ID NO: 1235 - DNA, 10 bp, Artificial Sequence
  Description of Artificial Sequence: Synthetic primer
tcggcaagcg

SEQ ID NO: 1236 - DNA, 10 bp, Artificial Sequence
  Description of Artificial Sequence: Synthetic primer
cgcctgatcg

SEQ ID NO: 1237 - DNA, 11 bp, Artificial Sequence
  Description of Artificial Sequence: Synthetic primer
tcggccttgcc

SEQ ID NO: 1238 - DNA, 11 bp, Artificial Sequence
  Description of Artificial Sequence: Synthetic primer
ttgcccgcgcc

SEQ ID NO: 1239 - DNA, 10 bp, Artificial Sequence
  Description of Artificial Sequence: Synthetic primer
gcgcgcctts

SEQ ID NO: 1240 - DNA, 11 bp, Artificial Sequence
  Description of Artificial Sequence: Synthetic primer
agcgccagcgc

SEQ ID NO: 1241 - DNA, 10 bp, Artificial Sequence
  Description of Artificial Sequence: Synthetic primer
gcgctgatcg

SEQ ID NO: 1242 - DNA, 11 bp, Artificial Sequence
  Description of Artificial Sequence: Synthetic primer
cggcaagggcg

SEQ ID NO: 1243 - DNA, 10 bp, Artificial Sequence
  Description of Artificial Sequence: Synthetic primer
gcgccttgcg

SEQ ID NO: 1244 - DNA, 10 bp, Artificial Sequence
  Description of Artificial Sequence: Synthetic primer
cggcaggccg

SEQ ID NO: 1245 - DNA, 11 bp, Artificial Sequence
  Description of Artificial Sequence: Synthetic primer
cgcctgccgca

SEQ ID NO: 1246 - DNA, 10 bp, Artificial Sequence
  Description of Artificial Sequence: Synthetic primer
gcttgcgcgc

SEQ ID NO: 1247 - DNA, 10 bp, Artificial Sequence
  Description of Artificial Sequence: Synthetic primer
cgccttgccg

SEQ ID NO: 1248 - DNA, 10 bp, Artificial Sequence
  Description of Artificial Sequence: Synthetic primer
gcgcgscatc

SEQ ID NO: 1249 - DNA, 10 bp, Artificial Sequence
  Description of Artificial Sequence: Synthetic primer
cgccaatgcg

SEQ ID NO: 1250 - DNA, 10 bp, Artificial Sequence
  Description of Artificial Sequence: Synthetic primer
gccatgcgcg

SEQ ID NO: 1251 - DNA, 10 bp, Artificial Sequence
  Description of Artificial Sequence: Synthetic primer
cggccttgcg

SEQ ID NO: 1252 - DNA, 10 bp, Artificial Sequence
  Description of Artificial Sequence: Synthetic primer
attgcccgcg

SEQ ID NO: 1253 - DNA, 10 bp, Artificial Sequence
  Description of Artificial Sequence: Synthetic primer
atcatgcgcg

SEQ ID NO: 1254 - DNA, 10 bp, Artificial Sequence
  Description of Artificial Sequence: Synthetic primer
gccgcgcgca

SEQ ID NO: 1255 - DNA, 10 bp, Artificial Sequence
  Description of Artificial Sequence: Synthetic primer
tgcggcgcgc

SEQ ID NO: 1256 - DNA, 10 bp, Artificial Sequence
  Description of Artificial Sequence: Synthetic primer
caaggcgctt

SEQ ID NO: 1257 - DNA, 10 bp, Artificial Sequence
  Description of Artificial Sequence: Synthetic primer
tcggcggcat

SEQ ID NO: 1258 - DNA, 10 bp, Artificial Sequence
  Description of Artificial Sequence: Synthetic primer
tgccgatgcg

SEQ ID NO: 1259 - DNA, 10 bp, Artificial Sequence
  Description of Artificial Sequence: Synthetic primer
gctttcggcg

SEQ ID NO: 1260 - DNA, 10 bp, Artificial Sequence
  Description of Artificial Sequence: Synthetic primer
tgcgcgccga

SEQ ID NO: 1261 - DNA, 10 bp, Artificial Sequence
  Description of Artificial Sequence: Synthetic primer
gatcaggcgc

SEQ ID NO: 1262 - DNA, 10 bp, Artificial Sequence
  Description of Artificial Sequence: Synthetic primer
gcgcttcggc

SEQ ID NO: 1263 - DNA, 10 bp, Artificial Sequence
  Description of Artificial Sequence: Synthetic primer
ggcgcgcatg

SEQ ID NO: 1264 - DNA, 10 bp, Artificial Sequence
  Description of Artificial Sequence: Synthetic primer
tcagcgcgcc

SEQ ID NO: 1265 - DNA, 10 bp, Artificial Sequence
  Description of Artificial Sequence: Synthetic primer
tcgcccgcat

SEQ ID NO: 1266 - DNA, 10 bp, Artificial Sequence
  Description of Artificial Sequence: Synthetic primer
cggcwtcggc

SEQ ID NO: 1267 - DNA, 10 bp, Artificial Sequence
  Description of Artificial Sequence: Synthetic primer
ccttgccgra

SEQ ID NO: 1268 - DNA, 10 bp, Artificial Sequence
  Description of Artificial Sequence: Synthetic primer
aggcgcgcaa

SEQ ID NO: 1269 - DNA, 10 bp, Artificial Sequence
  Description of Artificial Sequence: Synthetic primer
ggcgcggctt

SEQ ID NO: 1270 - DNA, 10 bp, Artificial Sequence
  Description of Artificial Sequence: Synthetic primer
gcgcgccagc

SEQ ID NO: 1271 - DNA, 10 bp, Artificial Sequence
  Description of Artificial Sequence: Synthetic primer
gatgcgccgc

SEQ ID NO: 1272 - DNA, 10 bp, Artificial Sequence
  Description of Artificial Sequence: Synthetic primer
cgcttcggca

SEQ ID NO: 1273 - DNA, 10 bp, Artificial Sequence
  Description of Artificial Sequence: Synthetic primer
gcgcaagccg

SEQ ID NO: 1274 - DNA, 10 bp, Artificial Sequence
  Description of Artificial Sequence: Synthetic primer
cgcgccgaaa

SEQ ID NO: 1275 - DNA, 10 bp, Artificial Sequence
  Description of Artificial Sequence: Synthetic primer
catcggcacg

SEQ ID NO: 1276 - DNA, 10 bp, Artificial Sequence
  Description of Artificial Sequence: Synthetic primer
atctggcgcg

SEQ ID NO: 1277 - DNA, 10 bp, Artificial Sequence
  Description of Artificial Sequence: Synthetic primer
ctgatccgcg

SEQ ID NO: 1278 - DNA, 10 bp, Artificial Sequence
  Description of Artificial Sequence: Synthetic primer
gccttgccgc

SEQ ID NO: 1279 - DNA, 10 bp, Artificial Sequence
  Description of Artificial Sequence: Synthetic primer
gcatccgcgc

SEQ ID NO: 1280 - DNA, 10 bp, Artificial Sequence
  Description of Artificial Sequence: Synthetic primer
ttgcggatcg

SEQ ID NO: 1281 - DNA, 10 bp, Artificial Sequence
  Description of Artificial Sequence: Synthetic primer
cagcgtatcg

SEQ ID NO: 1282 - DNA, 10 bp, Artificial Sequence
  Description of Artificial Sequence: Synthetic primer
ccgaaggcgc

SEQ ID NO: 1283 - DNA, 10 bp, Artificial Sequence
  Description of Artificial Sequence: Synthetic primer
ttgcgcgcca

SEQ ID NO: 1284 - DNA, 10 bp, Artificial Sequence
  Description of Artificial Sequence: Synthetic primer
cgcgaaggcg

SEQ ID NO: 1285 - DNA, 10 bp, Artificial Sequence
  Description of Artificial Sequence: Synthetic primer
gcggcaggcg

SEQ ID NO: 1286 - DNA, 10 bp, Artificial Sequence
  Description of Artificial Sequence: Synthetic primer
ggcttccgcc

SEQ ID NO: 1287 - DNA, 10 bp, Artificial Sequence
  Description of Artificial Sequence: Synthetic primer
cgatatcgac

SEQ ID NO: 1288 - DNA, 10 bp, Artificial Sequence
  Description of Artificial Sequence: Synthetic primer
cgggcggcaa

SEQ ID NO: 1289 - DNA, 10 bp, Artificial Sequence
  Description of Artificial Sequence: Synthetic primer
ttcggcctgc

SEQ ID NO: 1290 - DNA, 10 bp, Artificial Sequence
  Description of Artificial Sequence: Synthetic primer
tcgcgccggg

SEQ ID NO: 1291 - DNA, 10 bp, Artificial Sequence
  Description of Artificial Sequence: Synthetic primer
gcctttgccg

SEQ ID NO: 1292 - DNA, 10 bp, Artificial Sequence
  Description of Artificial Sequence: Synthetic primer
cgcgcgcttc

SEQ ID NO: 1293 - DNA, 10 bp, Artificial Sequence
  Description of Artificial Sequence: Synthetic primer
gcctgccgga

SEQ ID NO: 1294 - DNA, 10 bp, Artificial Sequence
  Description of Artificial Sequence: Synthetic primer
cgcaatggcg

SEQ ID NO: 1295 - DNA, 10 bp, Artificial Sequence
  Description of Artificial Sequence: Synthetic primer
ctggcgctcg

SEQ ID NO: 1296 - DNA, 10 bp, Artificial Sequence
  Description of Artificial Sequence: Synthetic primer
cgaaaagccg

SEQ ID NO: 1297 - DNA, 10 bp, Artificial Sequence
  Description of Artificial Sequence: Synthetic primer
cgcggcaggc

SEQ ID NO: 1298 - DNA, 10 bp, Artificial Sequence
  Description of Artificial Sequence: Synthetic primer
gccaatgcgg

SEQ ID NO: 1299 - DNA, 10 bp, Artificial Sequence
  Description of Artificial Sequence: Synthetic primer
tccggcgcat

SEQ ID NO: 1300 - DNA, 10 bp, Artificial Sequence
  Description of Artificial Sequence: Synthetic primer
cttcggcccg

SEQ ID NO: 1301 - DNA, 10 bp, Artificial Sequence
  Description of Artificial Sequence: Synthetic primer
gcgccatggc

SEQ ID NO: 1302 - DNA, 10 bp, Artificial Sequence
  Description of Artificial Sequence: Synthetic primer
cgcaagcttg

SEQ ID NO: 1303 - DNA, 10 bp, Artificial Sequence
  Description of Artificial Sequence: Synthetic primer
gaccggcaat

SEQ ID NO: 1304 - DNA, 10 bp, Artificial Sequence
  Description of Artificial Sequence: Synthetic primer
cgcaatcgcc

SEQ ID NO: 1305 - DNA, 10 bp, Artificial Sequence
  Description of Artificial Sequence: Synthetic primer
gcgccagcgg

SEQ ID NO: 1306 - DNA, 10 bp, Artificial Sequence
  Description of Artificial Sequence: Synthetic primer
atcgagcgcg

SEQ ID NO: 1307 - DNA, 10 bp, Artificial Sequence
  Description of Artificial Sequence: Synthetic primer
tcggcatggc

SEQ ID NO: 1308 - DNA, 10 bp, Artificial Sequence
  Description of Artificial Sequence: Synthetic primer
gccgcatcgc

SEQ ID NO: 1309 - DNA, 10 bp, Artificial Sequence
  Description of Artificial Sequence: Synthetic primer
gcggcaatca

SEQ ID NO: 1310 - DNA, 10 bp, Artificial Sequence
  Description of Artificial Sequence: Synthetic primer
gatgcggtcg

SEQ ID NO: 1311 - DNA, 10 bp, Artificial Sequence
  Description of Artificial Sequence: Synthetic primer
gcgtctggcg

SEQ ID NO: 1312 - DNA, 10 bp, Artificial Sequence
  Description of Artificial Sequence: Synthetic primer
gcggtcgcca

SEQ ID NO: 1313 - DNA, 10 bp, Artificial Sequence
  Description of Artificial Sequence: Synthetic primer
ccatgccgcc

SEQ ID NO: 1314 - DNA, 10 bp, Artificial Sequence
  Description of Artificial Sequence: Synthetic primer
cgccatgggc

SEQ ID NO: 1315 - DNA, 10 bp, Artificial Sequence
  Description of Artificial Sequence: Synthetic primer
gctcgaccag

SEQ ID NO: 1316 - DNA, 10 bp, Artificial Sequence
  Description of Artificial Sequence: Synthetic primer
cgccgatccg

SEQ ID NO: 1317 - DNA, 10 bp, Artificial Sequence
  Description of Artificial Sequence: Synthetic primer
gcctttcggc

SEQ ID NO: 1318 - DNA, 10 bp, Artificial Sequence
  Description of Artificial Sequence: Synthetic primer
acgccggaaa

SEQ ID NO: 1319 - DNA, 10 bp, Artificial Sequence
  Description of Artificial Sequence: Synthetic primer
tgccgcgccc

SEQ ID NO: 1320 - DNA, 10 bp, Artificial Sequence
  Description of Artificial Sequence: Synthetic primer
cgatgcggca

SEQ ID NO: 1321 - DNA, 10 bp, Artificial Sequence
  Description of Artificial Sequence: Synthetic primer
gcgaaacgcc

SEQ ID NO: 1322 - DNA, 10 bp, Artificial Sequence
  Description of Artificial Sequence: Synthetic primer
gccggtgccg

SEQ ID NO: 1323 - DNA, 10 bp, Artificial Sequence
  Description of Artificial Sequence: Synthetic primer
catttccggc

SEQ ID NO: 1324 - DNA, 10 bp, Artificial Sequence
  Description of Artificial Sequence: Synthetic primer
ttggcggcaa

SEQ ID NO: 1325 - DNA, 10 bp, Artificial Sequence
  Description of Artificial Sequence: Synthetic primer
gccggaactg

SEQ ID NO: 1326 - DNA, 10 bp, Artificial Sequence
  Description of Artificial Sequence: Synthetic primer
tgcgcgcccg

SEQ ID NO: 1327 - DNA, 10 bp, Artificial Sequence
  Description of Artificial Sequence: Synthetic primer
ccgatgccgg

SEQ ID NO: 1328 - DNA, 10 bp, Artificial Sequence
  Description of Artificial Sequence: Synthetic primer
cgaaatgcgc

SEQ ID NO: 1329 - DNA, 10 bp, Artificial Sequence
  Description of Artificial Sequence: Synthetic primer
cttcggcgat

SEQ ID NO: 1330 - DNA, 10 bp, Artificial Sequence
  Description of Artificial Sequence: Synthetic primer
cgacgatcag

SEQ ID NO: 1331 - DNA, 10 bp, Artificial Sequence
  Description of Artificial Sequence: Synthetic primer
gcggcggcaa

SEQ ID NO: 1332 - DNA, 10 bp, Artificial Sequence
  Description of Artificial Sequence: Synthetic primer
gaaagcggcg

SEQ ID NO: 1333 - DNA, 10 bp, Artificial Sequence
  Description of Artificial Sequence: Synthetic primer
tgccgccgac

SEQ ID NO: 1334 - DNA, 10 bp, Artificial Sequence
  Description of Artificial Sequence: Synthetic primer
cgcgcgccgg

SEQ ID NO: 1335 - DNA, 10 bp, Artificial Sequence
  Description of Artificial Sequence: Synthetic primer
gcttccgccg

SEQ ID NO: 1336 - DNA, 10 bp, Artificial Sequence
  Description of Artificial Sequence: Synthetic primer
cacgcgcggc

SEQ ID NO: 1337 - DNA, 10 bp, Artificial Sequence
  Description of Artificial Sequence: Synthetic primer
agcttgcgca

SEQ ID NO: 1338 - DNA, 10 bp, Artificial Sequence
  Description of Artificial Sequence: Synthetic primer
gcggcatgaa

SEQ ID NO: 1339 - DNA, 10 bp, Artificial Sequence
  Description of Artificial Sequence: Synthetic primer
gcgatttccg

SEQ ID NO: 1340 - DNA, 10 bp, Artificial Sequence
  Description of Artificial Sequence: Synthetic primer
ccttggcggc

SEQ ID NO: 1341 - DNA, 10 bp, Artificial Sequence
  Description of Artificial Sequence: Synthetic primer
tgcggcgctg

SEQ ID NO: 1342 - DNA, 10 bp, Artificial Sequence
  Description of Artificial Sequence: Synthetic primer
atgccgatgg

SEQ ID NO: 1343 - DNA, 10 bp, Artificial Sequence
  Description of Artificial Sequence: Synthetic primer
ggcgcaggct

SEQ ID NO: 1344 - DNA, 10 bp, Artificial Sequence
  Description of Artificial Sequence: Synthetic primer
cgcgcgggca

SEQ ID NO: 1345 - DNA, 10 bp, Artificial Sequence
  Description of Artificial Sequence: Synthetic primer
gcgctggcga

SEQ ID NO: 1346 - DNA, 10 bp, Artificial Sequence
  Description of Artificial Sequence: Synthetic primer
gccgggcgaa

SEQ ID NO: 1347 - DNA, 10 bp, Artificial Sequence
  Description of Artificial Sequence: Synthetic primer
gcgcgcttct

SEQ ID NO: 1348 - DNA, 10 bp, Artificial Sequence
  Description of Artificial Sequence: Synthetic primer
ggcgaagcgc

SEQ ID NO: 1349 - DNA, 10 bp, Artificial Sequence
  Description of Artificial Sequence: Synthetic primer
atcggcggcg

SEQ ID NO: 1350 - DNA, 10 bp, Artificial Sequence
  Description of Artificial Sequence: Synthetic primer
gaaaaggccg

SEQ ID NO: 1351 - DNA, 10 bp, Artificial Sequence
  Description of Artificial Sequence: Synthetic primer
aaaagccgcc

SEQ ID NO: 1352 - DNA, 10 bp, Artificial Sequence
  Description of Artificial Sequence: Synthetic primer
gccgcgccga

SEQ ID NO: 1353 - DNA, 10 bp, Artificial Sequence
  Description of Artificial Sequence: Synthetic primer
gcatcgccgc

SEQ ID NO: 1354 - DNA, 10 bp, Artificial Sequence
  Description of Artificial Sequence: Synthetic primer
tgccgaaagc

SEQ ID NO: 1355 - DNA, 10 bp, Artificial Sequence
  Description of Artificial Sequence: Synthetic primer
cggcgcgctc

SEQ ID NO: 1356 - DNA, 10 bp, Artificial Sequence
  Description of Artificial Sequence: Synthetic primer
cggcaagctc

SEQ ID NO: 1357 - DNA, 10 bp, Artificial Sequence
  Description of Artificial Sequence: Synthetic primer
cggccagttc

SEQ ID NO: 1358 - DNA, 10 bp, Artificial Sequence
  Description of Artificial Sequence: Synthetic primer
cttcggcctt

SEQ ID NO: 1359 - DNA, 10 bp, Artificial Sequence
  Description of Artificial Sequence: Synthetic primer
tgcgcggcgg

SEQ ID NO: 1360 - DNA, 10 bp, Artificial Sequence
  Description of Artificial Sequence: Synthetic primer
gcaagcgcat

SEQ ID NO: 1361 - DNA, 10 bp, Artificial Sequence
  Description of Artificial Sequence: Synthetic primer
aaggccgccg

SEQ ID NO: 1362 - DNA, 10 bp, Artificial Sequence
  Description of Artificial Sequence: Synthetic primer
caatggcggc

SEQ ID NO: 1363 - DNA, 10 bp, Artificial Sequence
  Description of Artificial Sequence: Synthetic primer
cggcggcacg

SEQ ID NO: 1364 - DNA, 10 bp, Artificial Sequence
  Description of Artificial Sequence: Synthetic primer
cctgcgccag

SEQ ID NO: 1365 - DNA, 10 bp, Artificial Sequence
  Description of Artificial Sequence: Synthetic primer
ttccggcatt

SEQ ID NO: 1366 - DNA, 10 bp, Artificial Sequence
  Description of Artificial Sequence: Synthetic primer
atcatcggcg

SEQ ID NO: 1367 - DNA, 10 bp, Artificial Sequence
  Description of Artificial Sequence: Synthetic primer
cttcatgccg

SEQ ID NO: 1368 - DNA, 10 bp, Artificial Sequence
  Description of Artificial Sequence: Synthetic primer
gatcgacggc

SEQ ID NO: 1369 - DNA, 10 bp, Artificial Sequence
  Description of Artificial Sequence: Synthetic primer
gatatcgagc

SEQ ID NO: 1370 - DNA, 10 bp, Artificial Sequence
  Description of Artificial Sequence: Synthetic primer
tcggcggaaa

SEQ ID NO: 1371 - DNA, 10 bp, Artificial Sequence
  Description of Artificial Sequence: Synthetic primer
ggcgcagatg

SEQ ID NO: 1372 - DNA, 10 bp, Artificial Sequence
  Description of Artificial Sequence: Synthetic primer
gatgccgacg

SEQ ID NO: 1373 - DNA, 10 bp, Artificial Sequence
  Description of Artificial Sequence: Synthetic primer
gccgccatsa

SEQ ID NO: 1374 - DNA, 10 bp, Artificial Sequence
  Description of Artificial Sequence: Synthetic primer
cggcatggtg

SEQ ID NO: 1375 - DNA, 10 bp, Artificial Sequence
  Description of Artificial Sequence: Synthetic primer
cggtgcgcgc

SEQ ID NO: 1376 - DNA, 10 bp, Artificial Sequence
  Description of Artificial Sequence: Synthetic primer
ccggttctgg

SEQ ID NO: 1377 - DNA, 10 bp, Artificial Sequence
  Description of Artificial Sequence: Synthetic primer
catgcccgcc

SEQ ID NO: 1378 - DNA, 10 bp, Artificial Sequence
  Description of Artificial Sequence: Synthetic primer
cgccatcgag

SEQ ID NO: 1379 - DNA, 10 bp, Artificial Sequence
  Description of Artificial Sequence: Synthetic primer
cgacgatttc

SEQ ID NO: 1380 - DNA, 10 bp, Artificial Sequence
  Description of Artificial Sequence: Synthetic primer
cggcagaagc

SEQ ID NO: 1381 - DNA, 10 bp, Artificial Sequence
  Description of Artificial Sequence: Synthetic primer
tgccatggcg

SEQ ID NO: 1382 - DNA, 10 bp, Artificial Sequence
  Description of Artificial Sequence: Synthetic primer
tcttgccgat

SEQ ID NO: 1383 - DNA, 10 bp, Artificial Sequence
  Description of Artificial Sequence: Synthetic primer
atggcgcgga

SEQ ID NO: 1384 - DNA, 9 bp, Artificial Sequence
  Description of Artificial Sequence: Synthetic primer
accggcccg

SEQ ID NO: 1385 - DNA, 9 bp, Artificial Sequence
  Description of Artificial Sequence: Synthetic primer
ccgatacgc

SEQ ID NO: 1386 - DNA, 9 bp, Artificial Sequence
  Description of Artificial Sequence: Synthetic primer
tgcgcgacc

SEQ ID NO: 1387 - DNA, 10 bp, Artificial Sequence
  Description of Artificial Sequence: Synthetic primer
attttccggc

SEQ ID NO: 1388 - DNA, 10 bp, Artificial Sequence
  Description of Artificial Sequence: Synthetic primer
cgccatcatg

SEQ ID NO: 1389 - DNA, 10 bp, Artificial Sequence
  Description of Artificial Sequence: Synthetic primer
ctcgatcatc

SEQ ID NO: 1390 - DNA, 10 bp, Artificial Sequence
  Description of Artificial Sequence: Synthetic primer
aatgccgcca

SEQ ID NO: 1391 - DNA, 9 bp, Artificial Sequence
  Description of Artificial Sequence: Synthetic primer
tcgatacgg

SEQ ID NO: 1392 - DNA, 9 bp, Artificial Sequence
  Description of Artificial Sequence: Synthetic primer
ggcgttgcg

SEQ ID NO: 1393 - DNA, 9 bp, Artificial Sequence
  Description of Artificial Sequence: Synthetic primer
cggcccgat

SEQ ID NO: 1394 - DNA, 10 bp, Artificial Sequence
  Description of Artificial Sequence: Synthetic primer
cgatttcatc

SEQ ID NO: 1395 - DNA, 10 bp, Artificial Sequence
  Description of Artificial Sequence: Synthetic primer
cgccgcttcc

SEQ ID NO: 1396 - DNA, 10 bp, Artificial Sequence
  Description of Artificial Sequence: Synthetic primer
tgaaaacggc

SEQ ID NO: 1397 - DNA, 10 bp, Artificial Sequence
  Description of Artificial Sequence: Synthetic primer
ccggcgggcg

SEQ ID NO: 1398 - DNA, 9 bp, Artificial Sequence
  Description of Artificial Sequence: Synthetic primer
acgatgcgg

SEQ ID NO: 1399 - DNA, 9 bp, Artificial Sequence
  Description of Artificial Sequence: Synthetic primer
attgccgac

SEQ ID NO: 1400 - DNA, 9 bp, Artificial Sequence
  Description of Artificial Sequence: Synthetic primer
ggccgcaac

SEQ ID NO: 1401 - DNA, 10 bp, Artificial Sequence
  Description of Artificial Sequence: Synthetic primer
cgcccgccgc

SEQ ID NO: 1402 - DNA, 9 bp, Artificial Sequence
  Description of Artificial Sequence: Synthetic primer
cgcatggtc

SEQ ID NO: 1403 - DNA, 10 bp, Artificial Sequence
  Description of Artificial Sequence: Synthetic primer
gcgcgcacgc

SEQ ID NO: 1404 - DNA, 10 bp, Artificial Sequence
  Description of Artificial Sequence: Synthetic primer
gcgaggcggc

SEQ ID NO: 1405 - DNA, 9 bp, Artificial Sequence
  Description of Artificial Sequence: Synthetic primer
atctgccgc

SEQ ID NO: 1406 - DNA, 12 bp, Artificial Sequence
  Description of Artificial Sequence: Synthetic primer
cgacgctcgcgc

SEQ ID NO: 1407 - DNA, 12 bp, Artificial Sequence
  Description of Artificial Sequence: Synthetic primer
gcgcgtcgmgcg

SEQ ID NO: 1408 - DNA, 12 bp, Artificial Sequence
  Description of Artificial Sequence: Synthetic primer
gcgctcgwcgcg

SEQ ID NO: 1409 - DNA, 12 bp, Artificial Sequence
  Description of Artificial Sequence: Synthetic primer
agtgacgcgtcg

SEQ ID NO: 1410 - DNA, 12 bp, Artificial Sequence
  Description of Artificial Sequence: Synthetic primer
cgcgctcgccgm

SEQ ID NO: 1411 - DNA, 12 bp, Artificial Sequence
  Description of Artificial Sequence: Synthetic primer
tcgcgcgcgagc

SEQ ID NO: 1412 - DNA, 12 bp, Artificial Sequence
  Description of Artificial Sequence: Synthetic primer
cgagcgcgtcga

SEQ ID NO: 1413 - DNA, 12 bp, Artificial Sequence
  Description of Artificial Sequence: Synthetic primer
cgcgagcgcgcc

SEQ ID NO: 1414 - DNA, 12 bp, Artificial Sequence
  Description of Artificial Sequence: Synthetic primer
gatcggcgcgcc

SEQ ID NO: 1415 - DNA, 12 bp, Artificial Sequence
  Description of Artificial Sequence: Synthetic primer
cacgacgctcgc

SEQ ID NO: 1416 - DNA, 12 bp, Artificial Sequence
  Description of Artificial Sequence: Synthetic primer
aaccgcggacgc

SEQ ID NO: 1417 - DNA, 12 bp, Artificial Sequence
  Description of Artificial Sequence: Synthetic primer
gcggcgctcgcg

SEQ ID NO: 1418 - DNA, 12 bp, Artificial Sequence
  Description of Artificial Sequence: Synthetic primer
gcgatcrcgccg

SEQ ID NO: 1419 - DNA, 12 bp, Artificial Sequence
  Description of Artificial Sequence: Synthetic primer
cgcgccggcgcg

SEQ ID NO: 1420 - DNA, 12 bp, Artificial Sequence
  Description of Artificial Sequence: Synthetic primer
gcgcggcgatcg

SEQ ID NO: 1421 - DNA, 12 bp, Artificial Sequence
  Description of Artificial Sequence: Synthetic primer
cgtcgattcggc

SEQ ID NO: 1422 - DNA, 12 bp, Artificial Sequence
  Description of Artificial Sequence: Synthetic primer
tccggcttcgcg

SEQ ID NO: 1423 - DNA, 12 bp, Artificial Sequence
  Description of Artificial Sequence: Synthetic primer
cccgacaagccg

SEQ ID NO: 1424 - DNA, 12 bp, Artificial Sequence
  Description of Artificial Sequence: Synthetic primer
gcgcgccgacgc

SEQ ID NO: 1425 - DNA, 12 bp, Artificial Sequence
  Description of Artificial Sequence: Synthetic primer
cgcgcgytcggc

SEQ ID NO: 1426 - DNA, 12 bp, Artificial Sequence
  Description of Artificial Sequence: Synthetic primer
gcgctcgcgaag

SEQ ID NO: 1427 - DNA, 12 bp, Artificial Sequence
  Description of Artificial Sequence: Synthetic primer
gmgcgcgccgcg

SEQ ID NO: 1428 - DNA, 12 bp, Artificial Sequence
  Description of Artificial Sequence: Synthetic primer
cgcttcgcgcgc

SEQ ID NO: 1429 - DNA, 12 bp, Artificial Sequence
  Description of Artificial Sequence: Synthetic primer
gcgwcgcccgcg

SEQ ID NO: 1430 - DNA, 12 bp, Artificial Sequence
  Description of Artificial Sequence: Synthetic primer
agcgcgacgagc

SEQ ID NO: 1431 - DNA, 12 bp, Artificial Sequence
  Description of Artificial Sequence: Synthetic primer
cgacgagcgcgc

SEQ ID NO: 1432 - DNA, 12 bp, Artificial Sequence
  Description of Artificial Sequence: Synthetic primer
gcagcgcgtcga

SEQ ID NO: 1433 - DNA, 12 bp, Artificial Sequence
  Description of Artificial Sequence: Synthetic primer
atgccgccgaac

SEQ ID NO: 1434 - DNA, 12 bp, Artificial Sequence
  Description of Artificial Sequence: Synthetic primer
tcgcggcgggcg

SEQ ID NO: 1435 - DNA, 12 bp, Artificial Sequence
  Description of Artificial Sequence: Synthetic primer
cgcgcacgtcga

SEQ ID NO: 1436 - DNA, 12 bp, Artificial Sequence
  Description of Artificial Sequence: Synthetic primer
cgcggcgcttga

SEQ ID NO: 1437 - DNA, 12 bp, Artificial Sequence
  Description of Artificial Sequence: Synthetic primer
cgcgagccgcgc

SEQ ID NO: 1438 - DNA, 12 bp, Artificial Sequence
  Description of Artificial Sequence: Synthetic primer
cgacgcccgccg

SEQ ID NO: 1439 - DNA, 12 bp, Artificial Sequence
  Description of Artificial Sequence: Synthetic primer
gcgcatcggcgc

SEQ ID NO: 1440 - DNA, 12 bp, Artificial Sequence
  Description of Artificial Sequence: Synthetic primer
cggcgagcgcgt

SEQ ID NO: 1441 - DNA, 12 bp, Artificial Sequence
  Description of Artificial Sequence: Synthetic primer
ctcgcgcagcgc

SEQ ID NO: 1442 - DNA, 12 bp, Artificial Sequence
  Description of Artificial Sequence: Synthetic primer
aaccgccgaacc

SEQ ID NO: 1443 - DNA, 12 bp, Artificial Sequence
  Description of Artificial Sequence: Synthetic primer
agcgtccgcggt

SEQ ID NO: 1444 - DNA, 12 bp, Artificial Sequence
  Description of Artificial Sequence: Synthetic primer
gaacttcgcgcg

SEQ ID NO: 1445 - DNA, 12 bp, Artificial Sequence
  Description of Artificial Sequence: Synthetic primer
gcgmgcgcgtcg

SEQ ID NO: 1446 - DNA, 12 bp, Artificial Sequence
  Description of Artificial Sequence: Synthetic primer
gcgcgctgcgcg

SEQ ID NO: 1447 - DNA, 12 bp, Artificial Sequence
  Description of Artificial Sequence: Synthetic primer
cgmcgatgcgcg

SEQ ID NO: 1448 - DNA, 12 bp, Artificial Sequence
  Description of Artificial Sequence: Synthetic primer
gtcggcgcgccg

SEQ ID NO: 1449 - DNA, 12 bp, Artificial Sequence
  Description of Artificial Sequence: Synthetic primer
gcgacgcgcgcc

SEQ ID NO: 1450 - DNA, 12 bp, Artificial Sequence
  Description of Artificial Sequence: Synthetic primer
gccgcgcgctcg

SEQ ID NO: 1451 - DNA, 12 bp, Artificial Sequence
  Description of Artificial Sequence: Synthetic primer
gcgckcgccgaa

SEQ ID NO: 1452 - DNA, 12 bp, Artificial Sequence
  Description of Artificial Sequence: Synthetic primer
tccttgaccggc

SEQ ID NO: 1453 - DNA, 12 bp, Artificial Sequence
  Description of Artificial Sequence: Synthetic primer
gcgcgccgttcg

SEQ ID NO: 1454 - DNA, 12 bp, Artificial Sequence
  Description of Artificial Sequence: Synthetic primer
atcgtcgcgggc

SEQ ID NO: 1455 - DNA, 12 bp, Artificial Sequence
  Description of Artificial Sequence: Synthetic primer
cggcgtcgcgct

SEQ ID NO: 1456 - DNA, 12 bp, Artificial Sequence
  Description of Artificial Sequence: Synthetic primer
atcggcgtcgcg

SEQ ID NO: 1457 - DNA, 12 bp, Artificial Sequence
  Description of Artificial Sequence: Synthetic primer
tcgcgagcgcgt

SEQ ID NO: 1458 - DNA, 12 bp, Artificial Sequence
  Description of Artificial Sequence: Synthetic primer
cgatcggcgcga

SEQ ID NO: 1459 - DNA, 12 bp, Artificial Sequence
  Description of Artificial Sequence: Synthetic primer
gcggccgtcgcg

SEQ ID NO: 1460 - DNA, 12 bp, Artificial Sequence
  Description of Artificial Sequence: Synthetic primer
cgcgccgagcas

SEQ ID NO: 1461 - DNA, 12 bp, Artificial Sequence
  Description of Artificial Sequence: Synthetic primer
tcgagcggcgcg

SEQ ID NO: 1462 - DNA, 12 bp, Artificial Sequence
  Description of Artificial Sequence: Synthetic primer
agactccggctg

SEQ ID NO: 1463 - DNA, 12 bp, Artificial Sequence
  Description of Artificial Sequence: Synthetic primer
tcgcggccgagc

SEQ ID NO: 1464 - DNA, 12 bp, Artificial Sequence
  Description of Artificial Sequence: Synthetic primer
tcgcgcgcgacg

SEQ ID NO: 1465 - DNA, 12 bp, Artificial Sequence
  Description of Artificial Sequence: Synthetic primer
cggccgcgcgcg

SEQ ID NO: 1466 - DNA, 12 bp, Artificial Sequence
  Description of Artificial Sequence: Synthetic primer
cgtcgcgatcca

SEQ ID NO: 1467 - DNA, 12 bp, Artificial Sequence
  Description of Artificial Sequence: Synthetic primer
tcggcatcgcgc

SEQ ID NO: 1468 - DNA, 12 bp, Artificial Sequence
  Description of Artificial Sequence: Synthetic primer
ggccgcgagcgc

SEQ ID NO: 1469 - DNA, 12 bp, Artificial Sequence
  Description of Artificial Sequence: Synthetic primer
cggcacgctcgc

SEQ ID NO: 1470 - DNA, 12 bp, Artificial Sequence
  Description of Artificial Sequence: Synthetic primer
cgatcgcggcgg

SEQ ID NO: 1471 - DNA, 12 bp, Artificial Sequence
  Description of Artificial Sequence: Synthetic primer
cgcgcacgcggc

SEQ ID NO: 1472 - DNA, 12 bp, Artificial Sequence
  Description of Artificial Sequence: Synthetic primer
cgcgcgcatcga

SEQ ID NO: 1473 - DNA, 12 bp, Artificial Sequence
  Description of Artificial Sequence: Synthetic primer
cgcgtcgaacgc

SEQ ID NO: 1474 - DNA, 12 bp, Artificial Sequence
  Description of Artificial Sequence: Synthetic primer
atcaagcgcggg

SEQ ID NO: 1475 - DNA, 12 bp, Artificial Sequence
  Description of Artificial Sequence: Synthetic primer
cgcgctcgtgct

SEQ ID NO: 1476 - DNA, 12 bp, Artificial Sequence
  Description of Artificial Sequence: Synthetic primer
ctcgccgcgcgc

SEQ ID NO: 1477 - DNA, 12 bp, Artificial Sequence
  Description of Artificial Sequence: Synthetic primer
ccgatgcgcgcg

SEQ ID NO: 1478 - DNA, 12 bp, Artificial Sequence
  Description of Artificial Sequence: Synthetic primer
cgccgcccgcga

SEQ ID NO: 1479 - DNA, 12 bp, Artificial Sequence
  Description of Artificial Sequence: Synthetic primer
gctcgagcgcgc

SEQ ID NO: 1480 - DNA, 12 bp, Artificial Sequence
  Description of Artificial Sequence: Synthetic primer
agcgcgtcgcgc

SEQ ID NO: 1481 - DNA, 12 bp, Artificial Sequence
  Description of Artificial Sequence: Synthetic primer
cgcggcgagcgc

SEQ ID NO: 1482 - DNA, 12 bp, Artificial Sequence
  Description of Artificial Sequence: Synthetic primer
cgagcgtcgcgc

SEQ ID NO: 1483 - DNA, 12 bp, Artificial Sequence
  Description of Artificial Sequence: Synthetic primer
cgcggtcgcgct

SEQ ID NO: 1484 - DNA, 12 bp, Artificial Sequence
  Description of Artificial Sequence: Synthetic primer
acagcgcgccga

SEQ ID NO: 1485 - DNA, 12 bp, Artificial Sequence
  Description of Artificial Sequence: Synthetic primer
cgccgcgttcgc

SEQ ID NO: 1486 - DNA, 12 bp, Artificial Sequence
  Description of Artificial Sequence: Synthetic primer
gttcggcgcgcg

SEQ ID NO: 1487 - DNA, 12 bp, Artificial Sequence
  Description of Artificial Sequence: Synthetic primer
cgtcgcgcggca

SEQ ID NO: 1488 - DNA, 12 bp, Artificial Sequence
  Description of Artificial Sequence: Synthetic primer
cgcgccgacgct

SEQ ID NO: 1489 - DNA, 12 bp, Artificial Sequence
  Description of Artificial Sequence: Synthetic primer
gcggcgagccgc

SEQ ID NO: 1490 - DNA, 12 bp, Artificial Sequence
  Description of Artificial Sequence: Synthetic primer
ttcggcgcgggc

SEQ ID NO: 1491 - DNA, 12 bp, Artificial Sequence
  Description of Artificial Sequence: Synthetic primer
cgcgcgaacgcg

SEQ ID NO: 1492 - DNA, 12 bp, Artificial Sequence
  Description of Artificial Sequence: Synthetic primer
gagcgcgatcgc

SEQ ID NO: 1493 - DNA, 12 bp, Artificial Sequence
  Description of Artificial Sequence: Synthetic primer
ggcgatcgccgc

SEQ ID NO: 1494 - DNA, 12 bp, Artificial Sequence
  Description of Artificial Sequence: Synthetic primer
cgacgccgcgct

SEQ ID NO: 1495 - DNA, 12 bp, Artificial Sequence
  Description of Artificial Sequence: Synthetic primer
gacgccgagcgc

SEQ ID NO: 1496 - DNA, 12 bp, Artificial Sequence
  Description of Artificial Sequence: Synthetic primer
ccgcgcacgcga

SEQ ID NO: 1497 - DNA, 12 bp, Artificial Sequence
  Description of Artificial Sequence: Synthetic primer
ttcggcggcgcg

SEQ ID NO: 1498 - DNA, 12 bp, Artificial Sequence
  Description of Artificial Sequence: Synthetic primer
atcgcggcgcgc

SEQ ID NO: 1499 - DNA, 12 bp, Artificial Sequence
  Description of Artificial Sequence: Synthetic primer
gcgcgcatcggc

SEQ ID NO: 1500 - DNA, 12 bp, Artificial Sequence
  Description of Artificial Sequence: Synthetic primer
cgatcaccgcgc

SEQ ID NO: 1501 - DNA, 12 bp, Artificial Sequence
  Description of Artificial Sequence: Synthetic primer
cttcggcgagcg

SEQ ID NO: 1502 - DNA, 12 bp, Artificial Sequence
  Description of Artificial Sequence: Synthetic primer
catccggcgcgc

SEQ ID NO: 1503 - DNA, 12 bp, Artificial Sequence
  Description of Artificial Sequence: Synthetic primer
cgacgatcgcgg

SEQ ID NO: 1504 - DNA, 12 bp, Artificial Sequence
  Description of Artificial Sequence: Synthetic primer
cggcgaacgcgg

SEQ ID NO: 1505 - DNA, 12 bp, Artificial Sequence
  Description of Artificial Sequence: Synthetic primer
cgcgcgcaagcg

SEQ ID NO: 1506 - DNA, 12 bp, Artificial Sequence
  Description of Artificial Sequence: Synthetic primer
cgcgtgctcgac

SEQ ID NO: 1507 - DNA, 12 bp, Artificial Sequence
  Description of Artificial Sequence: Synthetic primer
gcctgccgcgcg

SEQ ID NO: 1508 - DNA, 12 bp, Artificial Sequence
  Description of Artificial Sequence: Synthetic primer
cgctcgtcggcc

SEQ ID NO: 1509 - DNA, 12 bp, Artificial Sequence
  Description of Artificial Sequence: Synthetic primer
gagcgcttcggc

SEQ ID NO: 1510 - DNA, 12 bp, Artificial Sequence
  Description of Artificial Sequence: Synthetic primer
cgggcctcgcgc

SEQ ID NO: 1511 - DNA, 12 bp, Artificial Sequence
  Description of Artificial Sequence: Synthetic primer
ccgcgccgcgca

SEQ ID NO: 1512 - DNA, 12 bp, Artificial Sequence
  Description of Artificial Sequence: Synthetic primer
cgcttcgacgcg

SEQ ID NO: 1513 - DNA, 11 bp, Artificial Sequence
  Description of Artificial Sequence: Synthetic primer
cgcgcaggacg

SEQ ID NO: 1514 - DNA, 11 bp, Artificial Sequence
  Description of Artificial Sequence: Synthetic primer
acgccgatgcg

SEQ ID NO: 1515 - DNA, 12 bp, Artificial Sequence
  Description of Artificial Sequence: Synthetic primer
gcgccgacgccg

SEQ ID NO: 1516 - DNA, 11 bp, Artificial Sequence
  Description of Artificial Sequence: Synthetic primer
tgcgcgtgacg

SEQ ID NO: 1517 - DNA, 12 bp, Artificial Sequence
  Description of Artificial Sequence: Synthetic primer
gacgcgctcgcg

SEQ ID NO: 1518 - DNA, 12 bp, Artificial Sequence
  Description of Artificial Sequence: Synthetic primer
gcgtcgagcgcg

SEQ ID NO: 1519 - DNA, 12 bp, Artificial Sequence
  Description of Artificial Sequence: Synthetic primer
tcgkcgcgctcg

SEQ ID NO: 1520 - DNA, 12 bp, Artificial Sequence
  Description of Artificial Sequence: Synthetic primer
cgccgcgccgty

SEQ ID NO: 1521 - DNA, 10 bp, Artificial Sequence
  Description of Artificial Sequence: Synthetic primer
attcggcgcg

SEQ ID NO: 1522 - DNA, 12 bp, Artificial Sequence
  Description of Artificial Sequence: Synthetic primer
gcgtcttcagca

SEQ ID NO: 1523 - DNA, 12 bp, Artificial Sequence
  Description of Artificial Sequence: Synthetic primer
ggcgggcgcgcg

SEQ ID NO: 1524 - DNA, 12 bp, Artificial Sequence
  Description of Artificial Sequence: Synthetic primer
cgatgtcgtcga

SEQ ID NO: 1525 - DNA, 12 bp, Artificial Sequence
  Description of Artificial Sequence: Synthetic primer
acgagcggcagc

SEQ ID NO: 1526 - DNA, 11 bp, Artificial Sequence
  Description of Artificial Sequence: Synthetic primer
cgggcttgccg

SEQ ID NO: 1527 - DNA, 12 bp, Artificial Sequence
  Description of Artificial Sequence: Synthetic primer
cgtcgacgacgt

SEQ ID NO: 1528 - DNA, 11 bp, Artificial Sequence
  Description of Artificial Sequence: Synthetic primer
cgtcgaacagc

SEQ ID NO: 1529 - DNA, 11 bp, Artificial Sequence
  Description of Artificial Sequence: Synthetic primer
gccgcccgtca

SEQ ID NO: 1530 - DNA, 11 bp, Artificial Sequence
  Description of Artificial Sequence: Synthetic primer
attcgagcgcg

SEQ ID NO: 1531 - DNA, 11 bp, Artificial Sequence
  Description of Artificial Sequence: Synthetic primer
cgtcagcacga

SEQ ID NO: 1532 - DNA, 11 bp, Artificial Sequence
  Description of Artificial Sequence: Synthetic primer
tcgcatcggcg

SEQ ID NO: 1533 - DNA, 10 bp, Artificial Sequence
  Description of Artificial Sequence: Synthetic primer
cgccgacgca

SEQ ID NO: 1534 - DNA, 11 bp, Artificial Sequence
  Description of Artificial Sequence: Synthetic primer
gctcgagatcg

SEQ ID NO: 1535 - DNA, 10 bp, Artificial Sequence
  Description of Artificial Sequence: Synthetic primer
ccgctacgcg

SEQ ID NO: 1536 - DNA, 11 bp, Artificial Sequence
  Description of Artificial Sequence: Synthetic primer
cgccgaaatcg

SEQ ID NO: 1537 - DNA, 11 bp, Artificial Sequence
  Description of Artificial Sequence: Synthetic primer
acgccgagccg

SEQ ID NO: 1538 - DNA, 11 bp, Artificial Sequence
  Description of Artificial Sequence: Synthetic primer
cggcaagccga

SEQ ID NO: 1539 - DNA, 12 bp, Artificial Sequence
  Description of Artificial Sequence: Synthetic primer
tggccgcggcgg

SEQ ID NO: 1540 - DNA, 11 bp, Artificial Sequence
  Description of Artificial Sequence: Synthetic primer
cgagcttgtcg

SEQ ID NO: 1541 - DNA, 11 bp, Artificial Sequence
  Description of Artificial Sequence: Synthetic primer
gaacgccggcg

SEQ ID NO: 1542 - DNA, 11 bp, Artificial Sequence
  Description of Artificial Sequence: Synthetic primer
cgcttcgacga

SEQ ID NO: 1543 - DNA, 11 bp, Artificial Sequence
  Description of Artificial Sequence: Synthetic primer
cggtgcgcgtg

SEQ ID NO: 1544 - DNA, 11 bp, Artificial Sequence
  Description of Artificial Sequence: Synthetic primer
tcgacgtcgtg

SEQ ID NO: 1545 - DNA, 10 bp, Artificial Sequence
  Description of Artificial Sequence: Synthetic primer
acgtcgcgaa

SEQ ID NO: 1546 - DNA, 12 bp, Artificial Sequence
  Description of Artificial Sequence: Synthetic primer
cggcggcgggcc

SEQ ID NO: 1547 - DNA, 10 bp, Artificial Sequence
  Description of Artificial Sequence: Synthetic primer
cgtcgcgctt

SEQ ID NO: 1548 - DNA, 11 bp, Artificial Sequence
  Description of Artificial Sequence: Synthetic primer
gcgctcacgct

SEQ ID NO: 1549 - DNA, 10 bp, Artificial Sequence
  Description of Artificial Sequence: Synthetic primer
gcttcgcgaa

SEQ ID NO: 1550 - DNA, 10 bp, Artificial Sequence
  Description of Artificial Sequence: Synthetic primer
aggcccgcgc

SEQ ID NO: 1551 - DNA, 11 bp, Artificial Sequence
  Description of Artificial Sequence: Synthetic primer
cgcgttcctcg

SEQ ID NO: 1552 - DNA, 11 bp, Artificial Sequence
  Description of Artificial Sequence: Synthetic primer
cttcgacgagc

SEQ ID NO: 1553 - DNA, 10 bp, Artificial Sequence
  Description of Artificial Sequence: Synthetic primer
tcgtcgggca

SEQ ID NO: 1554 - DNA, 12 bp, Artificial Sequence
  Description of Artificial Sequence: Synthetic primer
cgcgatcggcgs

SEQ ID NO: 1555 - DNA, 12 bp, Artificial Sequence
  Description of Artificial Sequence: Synthetic primer
cggcgcgctcgy

SEQ ID NO: 1556 - DNA, 12 bp, Artificial Sequence
  Description of Artificial Sequence: Synthetic primer
cgcgccgcgcga

SEQ ID NO: 1557 - DNA, 10 bp, Artificial Sequence
  Description of Artificial Sequence: Synthetic primer
catgtcgcgc

SEQ ID NO: 1558 - DNA, 11 bp, Artificial Sequence
  Description of Artificial Sequence: Synthetic primer
cgacggcaccg

SEQ ID NO: 1559 - DNA, 11 bp, Artificial Sequence
  Description of Artificial Sequence: Synthetic primer
cgaggccgatg

SEQ ID NO: 1560 - DNA, 10 bp, Artificial Sequence
  Description of Artificial Sequence: Synthetic primer
gaacgcggtc

SEQ ID NO: 1561 - DNA, 12 bp, Artificial Sequence
  Description of Artificial Sequence: Synthetic primer
cgcgcgcgcgtt

SEQ ID NO: 1562 - DNA, 10 bp, Artificial Sequence
  Description of Artificial Sequence: Synthetic primer
ccggcttgcg

SEQ ID NO: 1563 - DNA, 11 bp, Artificial Sequence
  Description of Artificial Sequence: Synthetic primer
tcgtgctcgag

SEQ ID NO: 1564 - DNA, 12 bp, Artificial Sequence
  Description of Artificial Sequence: Synthetic primer
caccgcgccgcc

SEQ ID NO: 1565 - DNA, 12 bp, Artificial Sequence
  Description of Artificial Sequence: Synthetic primer
tcgccgcccgcc

SEQ ID NO: 1566 - DNA, 10 bp, Artificial Sequence
  Description of Artificial Sequence: Synthetic primer
cgtcgtgatg

SEQ ID NO: 1567 - DNA, 10 bp, Artificial Sequence
  Description of Artificial Sequence: Synthetic primer
cgcgcagaag

SEQ ID NO: 1568 - DNA, 10 bp, Artificial Sequence
  Description of Artificial Sequence: Synthetic primer
cggcatgacg

SEQ ID NO: 1569 - DNA, 12 bp, Artificial Sequence
  Description of Artificial Sequence: Synthetic primer
ccgcgccgccgt

SEQ ID NO: 1570 - DNA, 11 bp, Artificial Sequence
  Description of Artificial Sequence: Synthetic primer
cgagcgaatcg

SEQ ID NO: 1571 - DNA, 11 bp, Artificial Sequence
  Description of Artificial Sequence: Synthetic primer
acctgctcggc

SEQ ID NO: 1572 - DNA, 11 bp, Artificial Sequence
  Description of Artificial Sequence: Synthetic primer
agcgggcgcgc

SEQ ID NO: 1573 - DNA, 12 bp, Artificial Sequence
  Description of Artificial Sequence: Synthetic primer
aaagccctgagc

SEQ ID NO: 1574 - DNA, 10 bp, Artificial Sequence
  Description of Artificial Sequence: Synthetic primer
tccgcgacgc

SEQ ID NO: 1575 - DNA, 10 bp, Artificial Sequence
  Description of Artificial Sequence: Synthetic primer
atcgcccggc

SEQ ID NO: 1576 - DNA, 10 bp, Artificial Sequence
  Description of Artificial Sequence: Synthetic primer
gcacgggcgt

SEQ ID NO: 1577 - DNA, 10 bp, Artificial Sequence
  Description of Artificial Sequence: Synthetic primer
ggcgtgaccg

SEQ ID NO: 1578 - DNA, 10 bp, Artificial Sequence
  Description of Artificial Sequence: Synthetic primer
cgccgaagtg

SEQ ID NO: 1579 - DNA, 10 bp, Artificial Sequence
  Description of Artificial Sequence: Synthetic primer
tacggcgcgg

SEQ ID NO: 1580 - DNA, 10 bp, Artificial Sequence
  Description of Artificial Sequence: Synthetic primer
actgcgcgag

SEQ ID NO: 1581 - DNA, 11 bp, Artificial Sequence
  Description of Artificial Sequence: Synthetic primer
cggcatcggct

SEQ ID NO: 1582 - DNA, 11 bp, Artificial Sequence
  Description of Artificial Sequence: Synthetic primer
cgtcctcgacg

SEQ ID NO: 1583 - DNA, 10 bp, Artificial Sequence
  Description of Artificial Sequence: Synthetic primer
cgtgctgacg

SEQ ID NO: 1584 - DNA, 10 bp, Artificial Sequence
  Description of Artificial Sequence: Synthetic primer
ggcatgccgc

SEQ ID NO: 1585 - DNA, 10 bp, Artificial Sequence
  Description of Artificial Sequence: Synthetic primer
cgcgaacttc

SEQ ID NO: 1586 - DNA, 10 bp, Artificial Sequence
  Description of Artificial Sequence: Synthetic primer
gcggtccgcg

SEQ ID NO: 1587 - DNA, 12 bp, Artificial Sequence
  Description of Artificial Sequence: Synthetic primer
acatgaagaagc

SEQ ID NO: 1588 - DNA, 10 bp, Artificial Sequence
  Description of Artificial Sequence: Synthetic primer
tgcgcacggc

SEQ ID NO: 1589 - DNA, 12 bp, Artificial Sequence
  Description of Artificial Sequence: Synthetic primer
gcgccgccgtcg

SEQ ID NO: 1590 - DNA, 10 bp, Artificial Sequence
  Description of Artificial Sequence: Synthetic primer
acgccgcgat

SEQ ID NO: 1591 - DNA, 12 bp, Artificial Sequence
  Description of Artificial Sequence: Synthetic primer
cggataaggcgt

SEQ ID NO: 1592 - DNA, 12 bp, Artificial Sequence
  Description of Artificial Sequence: Synthetic primer
cctgatgcgacg

SEQ ID NO: 1593 - DNA, 12 bp, Artificial Sequence
  Description of Artificial Sequence: Synthetic primer
agcgtcgcatca

SEQ ID NO: 1594 - DNA, 12 bp, Artificial Sequence
  Description of Artificial Sequence: Synthetic primer
cgccttatccgg

SEQ ID NO: 1595 - DNA, 12 bp, Artificial Sequence
  Description of Artificial Sequence: Synthetic primer
aggcgttcacgc

SEQ ID NO: 1596 - DNA, 12 bp, Artificial Sequence
  Description of Artificial Sequence: Synthetic primer
gatgcggcgtga

SEQ ID NO: 1597 - DNA, 12 bp, Artificial Sequence
  Description of Artificial Sequence: Synthetic primer
tatcaggcctac

SEQ ID NO: 1598 - DNA, 12 bp, Artificial Sequence
  Description of Artificial Sequence: Synthetic primer
taggcctgataa

SEQ ID NO: 1599 - DNA, 11 bp, Artificial Sequence
  Description of Artificial Sequence: Synthetic primer
gcctgatgcgc

SEQ ID NO: 1600 - DNA, 11 bp, Artificial Sequence
  Description of Artificial Sequence: Synthetic primer
acgcgccagcg

SEQ ID NO: 1601 - DNA, 10 bp, Artificial Sequence
  Description of Artificial Sequence: Synthetic primer
cgcgctggcg

SEQ ID NO: 1602 - DNA, 10 bp, Artificial Sequence
  Description of Artificial Sequence: Synthetic primer
gctggcgcgt

SEQ ID NO: 1603 - DNA, 11 bp, Artificial Sequence
  Description of Artificial Sequence: Synthetic primer
ttccgccagcg

SEQ ID NO: 1604 - DNA, 10 bp, Artificial Sequence
  Description of Artificial Sequence: Synthetic primer
gcttccagcg

SEQ ID NO: 1605 - DNA, 10 bp, Artificial Sequence
  Description of Artificial Sequence: Synthetic primer
gccgcaggcg

SEQ ID NO: 1606 - DNA, 10 bp, Artificial Sequence
  Description of Artificial Sequence: Synthetic primer
tgaccgccag

SEQ ID NO: 1607 - DNA, 10 bp, Artificial Sequence
  Description of Artificial Sequence: Synthetic primer
ggtgctggcg

SEQ ID NO: 1608 - DNA, 10 bp, Artificial Sequence
  Description of Artificial Sequence: Synthetic primer
ggcggtgatg

SEQ ID NO: 1609 - DNA, 10 bp, Artificial Sequence
  Description of Artificial Sequence: Synthetic primer
gcwgacgctg

SEQ ID NO: 1610 - DNA, 10 bp, Artificial Sequence
  Description of Artificial Sequence: Synthetic primer
ctgataagcg

SEQ ID NO: 1611 - DNA, 10 bp, Artificial Sequence
  Description of Artificial Sequence: Synthetic primer
cgctggcctg

SEQ ID NO: 1612 - DNA, 10 bp, Artificial Sequence
  Description of Artificial Sequence: Synthetic primer
gatgccgcca

SEQ ID NO: 1613 - DNA, 10 bp, Artificial Sequence
  Description of Artificial Sequence: Synthetic primer
atggcgttaa

SEQ ID NO: 1614 - DNA, 10 bp, Artificial Sequence
  Description of Artificial Sequence: Synthetic primer
attactggcg

SEQ ID NO: 1615 - DNA, 10 bp, Artificial Sequence
  Description of Artificial Sequence: Synthetic primer
aacgctggat

SEQ ID NO: 1616 - DNA, 9 bp, Artificial Sequence
  Description of Artificial Sequence: Synthetic primer
ggcgttaas

SEQ ID NO: 1617 - DNA, 10 bp, Artificial Sequence
  Description of Artificial Sequence: Synthetic primer
cagcgcctgg

SEQ ID NO: 1618 - DNA, 10 bp, Artificial Sequence
  Description of Artificial Sequence: Synthetic primer
atcgccatca

SEQ ID NO: 1619 - DNA, 10 bp, Artificial Sequence
  Description of Artificial Sequence: Synthetic primer
ttccggcagc

SEQ ID NO: 1620 - DNA, 10 bp, Artificial Sequence
  Description of Artificial Sequence: Synthetic primer
acgccagcca

SEQ ID NO: 1621 - DNA, 10 bp, Artificial Sequence
  Description of Artificial Sequence: Synthetic primer
ctgcgtgaag

SEQ ID NO: 1622 - DNA, 10 bp, Artificial Sequence
  Description of Artificial Sequence: Synthetic primer
cgccatcgcg

SEQ ID NO: 1623 - DNA, 9 bp, Artificial Sequence
  Description of Artificial Sequence: Synthetic primer
cgggcgata

SEQ ID NO: 1624 - DNA, 9 bp, Artificial Sequence
  Description of Artificial Sequence: Synthetic primer
atccggcgt

SEQ ID NO: 1625 - DNA, 10 bp, Artificial Sequence
  Description of Artificial Sequence: Synthetic primer
ccagccagcg

SEQ ID NO: 1626 - DNA, 9 bp, Artificial Sequence
  Description of Artificial Sequence: Synthetic primer
tggcgatac

SEQ ID NO: 1627 - DNA, 9 bp, Artificial Sequence
  Description of Artificial Sequence: Synthetic primer
ccagtacgc

SEQ ID NO: 1628 - DNA, 10 bp, Artificial Sequence
  Description of Artificial Sequence: Synthetic primer
aaaaagccgc

SEQ ID NO: 1629 - DNA, 10 bp, Artificial Sequence
  Description of Artificial Sequence: Synthetic primer
cgctggcgrt

SEQ ID NO: 1630 - DNA, 11 bp, Artificial Sequence
  Description of Artificial Sequence: Synthetic primer
caatcgccagc

SEQ ID NO: 1631 - DNA, 10 bp, Artificial Sequence
  Description of Artificial Sequence: Synthetic primer
cgccagcgca

SEQ ID NO: 1632 - DNA, 10 bp, Artificial Sequence
  Description of Artificial Sequence: Synthetic primer
cgccagttcg

SEQ ID NO: 1633 - DNA, 10 bp, Artificial Sequence
  Description of Artificial Sequence: Synthetic primer
ttacgccgca

SEQ ID NO: 1634 - DNA, 10 bp, Artificial Sequence
  Description of Artificial Sequence: Synthetic primer
aactggcgcg

SEQ ID NO: 1635 - DNA, 11 bp, Artificial Sequence
  Description of Artificial Sequence: Synthetic primer
ctggcgctgat

SEQ ID NO: 1636 - DNA, 10 bp, Artificial Sequence
  Description of Artificial Sequence: Synthetic primer
gcgccagcgc

SEQ ID NO: 1637 - DNA, 10 bp, Artificial Sequence
  Description of Artificial Sequence: Synthetic primer
ttaacgccgc

SEQ ID NO: 1638 - DNA, 10 bp, Artificial Sequence
  Description of Artificial Sequence: Synthetic primer
ctggcgctgg

SEQ ID NO: 1639 - DNA, 10 bp, Artificial Sequence
  Description of Artificial Sequence: Synthetic primer
gcgctggcgr

SEQ ID NO: 1640 - DNA, 10 bp, Artificial Sequence
  Description of Artificial Sequence: Synthetic primer
gaactggcgc

SEQ ID NO: 1641 - DNA, 10 bp, Artificial Sequence
  Description of Artificial Sequence: Synthetic primer
ggcaatcgcc

SEQ ID NO: 1642 - DNA, 10 bp, Artificial Sequence
  Description of Artificial Sequence: Synthetic primer
catcacgctg

SEQ ID NO: 1643 - DNA, 9 bp, Artificial Sequence
  Description of Artificial Sequence: Synthetic primer
cgccagrtt

SEQ ID NO: 1644 - DNA, 9 bp, Artificial Sequence
  Description of Artificial Sequence: Synthetic primer
atacgctgg

SEQ ID NO: 1645 - DNA, 9 bp, Artificial Sequence
  Description of Artificial Sequence: Synthetic primer
ttaacggcg

SEQ ID NO: 1646 - DNA, 9 bp, Artificial Sequence
  Description of Artificial Sequence: Synthetic primer
aacgccgcg

SEQ ID NO: 1647 - DNA, 9 bp, Artificial Sequence
  Description of Artificial Sequence: Synthetic primer
acgcctgat

SEQ ID NO: 1648 - DNA, 9 bp, Artificial Sequence
  Description of Artificial Sequence: Synthetic primer
cggcgtaat

SEQ ID NO: 1649 - DNA, 9 bp, Artificial Sequence
  Description of Artificial Sequence: Synthetic primer
ggcgtactg

SEQ ID NO: 1650 - DNA, 10 bp, Artificial Sequence
  Description of Artificial Sequence: Synthetic primer
atcaccatcg

SEQ ID NO: 1651 - DNA, 10 bp, Artificial Sequence
  Description of Artificial Sequence: Synthetic primer
cgtcagcaaa

SEQ ID NO: 1652 - DNA, 10 bp, Artificial Sequence
  Description of Artificial Sequence: Synthetic primer
cagcgtttta

SEQ ID NO: 1653 - DNA, 10 bp, Artificial Sequence
  Description of Artificial Sequence: Synthetic primer
tgatggcggc

SEQ ID NO: 1654 - DNA, 10 bp, Artificial Sequence
  Description of Artificial Sequence: Synthetic primer
tcgctgccag

SEQ ID NO: 1655 - DNA, 9 bp, Artificial Sequence
  Description of Artificial Sequence: Synthetic primer
cggcattra

SEQ ID NO: 1656 - DNA, 9 bp, Artificial Sequence
  Description of Artificial Sequence: Synthetic primer
aacgccaga

SEQ ID NO: 1657 - DNA, 9 bp, Artificial Sequence
  Description of Artificial Sequence: Synthetic primer
cgtctggca

SEQ ID NO: 1658 - DNA, 9 bp, Artificial Sequence
  Description of Artificial Sequence: Synthetic primer
tcaggcgtt

SEQ ID NO: 1659 - DNA, 9 bp, Artificial Sequence
  Description of Artificial Sequence: Synthetic primer
tccggcagt

SEQ ID NO: 1660 - DNA, 9 bp, Artificial Sequence
  Description of Artificial Sequence: Synthetic primer
aaagcgccg

SEQ ID NO: 1661 - DNA, 9 bp, Artificial Sequence
  Description of Artificial Sequence: Synthetic primer
ccggtaaag

SEQ ID NO: 1662 - DNA, 9 bp, Artificial Sequence
  Description of Artificial Sequence: Synthetic primer
acgccgcag

SEQ ID NO: 1663 - DNA, 9 bp, Artificial Sequence
  Description of Artificial Sequence: Synthetic primer
gcgcgtaat

SEQ ID NO: 1664 - DNA, 9 bp, Artificial Sequence
  Description of Artificial Sequence: Synthetic primer
gtgccggta

SEQ ID NO: 1665 - DNA, 9 bp, Artificial Sequence
  Description of Artificial Sequence: Synthetic primer
tcagcgcga

SEQ ID NO: 1666 - DNA, 9 bp, Artificial Sequence
  Description of Artificial Sequence: Synthetic primer
ccgggttaa

SEQ ID NO: 1667 - DNA, 10 bp, Artificial Sequence
  Description of Artificial Sequence: Synthetic primer
cgccagacgc

SEQ ID NO: 1668 - DNA, 10 bp, Artificial Sequence
  Description of Artificial Sequence: Synthetic primer
gcgtttacgc

SEQ ID NO: 1669 - DNA, 10 bp, Artificial Sequence
  Description of Artificial Sequence: Synthetic primer
acgctggcgg

SEQ ID NO: 1670 - DNA, 11 bp, Artificial Sequence
  Description of Artificial Sequence: Synthetic primer
caggcgctgga

SEQ ID NO: 1671 - DNA, 10 bp, Artificial Sequence
  Description of Artificial Sequence: Synthetic primer
gcrgcggtaa

SEQ ID NO: 1672 - DNA, 10 bp, Artificial Sequence
  Description of Artificial Sequence: Synthetic primer
cgatacgctg

SEQ ID NO: 1673 - DNA, 10 bp, Artificial Sequence
  Description of Artificial Sequence: Synthetic primer
cgccagaccg

SEQ ID NO: 1674 - DNA, 11 bp, Artificial Sequence
  Description of Artificial Sequence: Synthetic primer
tcgccagcgcc

SEQ ID NO: 1675 - DNA, 10 bp, Artificial Sequence
  Description of Artificial Sequence: Synthetic primer
gcaactggcg

SEQ ID NO: 1676 - DNA, 10 bp, Artificial Sequence
  Description of Artificial Sequence: Synthetic primer
actggcggcg

SEQ ID NO: 1677 - DNA, 10 bp, Artificial Sequence
  Description of Artificial Sequence: Synthetic primer
cgccagcggc

SEQ ID NO: 1678 - DNA, 10 bp, Artificial Sequence
  Description of Artificial Sequence: Synthetic primer
ccgctggcga

SEQ ID NO: 1679 - DNA, 10 bp, Artificial Sequence
  Description of Artificial Sequence: Synthetic primer
cgcgctggat

SEQ ID NO: 1680 - DNA, 9 bp, Artificial Sequence
  Description of Artificial Sequence: Synthetic primer
gactggcgc

SEQ ID NO: 1681 - DNA, 9 bp, Artificial Sequence
  Description of Artificial Sequence: Synthetic primer
gaataccgc

SEQ ID NO: 1682 - DNA, 9 bp, Artificial Sequence
  Description of Artificial Sequence: Synthetic primer
tatcaggcg

SEQ ID NO: 1683 - DNA, 9 bp, Artificial Sequence
  Description of Artificial Sequence: Synthetic primer
tgctgacgg

SEQ ID NO: 1684 - DNA, 9 bp, Artificial Sequence
  Description of Artificial Sequence: Synthetic primer
ctgccgcgc

SEQ ID NO: 1685 - DNA, 9 bp, Artificial Sequence
  Description of Artificial Sequence: Synthetic primer
cattgccga

SEQ ID NO: 1686 - DNA, 9 bp, Artificial Sequence
  Description of Artificial Sequence: Synthetic primer
aacggcgaa

SEQ ID NO: 1687 - DNA, 9 bp, Artificial Sequence
  Description of Artificial Sequence: Synthetic primer
tttaccgtc

SEQ ID NO: 1688 - DNA, 9 bp, Artificial Sequence
  Description of Artificial Sequence: Synthetic primer
tattcagcg

SEQ ID NO: 1689 - DNA, 9 bp, Artificial Sequence
  Description of Artificial Sequence: Synthetic primer
gacgctgat

SEQ ID NO: 1690 - DNA, 9 bp, Artificial Sequence
  Description of Artificial Sequence: Synthetic primer
ttgcgccgc

SEQ ID NO: 1691 - DNA, 9 bp, Artificial Sequence
  Description of Artificial Sequence: Synthetic primer
tccgccagg

SEQ ID NO: 1692 - DNA, 9 bp, Artificial Sequence
  Description of Artificial Sequence: Synthetic primer
accatcggc

SEQ ID NO: 1693 - DNA, 9 bp, Artificial Sequence
  Description of Artificial Sequence: Synthetic primer
cgcggcgaa

SEQ ID NO: 1694 - DNA, 9 bp, Artificial Sequence
  Description of Artificial Sequence: Synthetic primer
cagatcgcc

SEQ ID NO: 1695 - DNA, 9 bp, Artificial Sequence
  Description of Artificial Sequence: Synthetic primer
atcaccgga

SEQ ID NO: 1696 - DNA, 9 bp, Artificial Sequence
  Description of Artificial Sequence: Synthetic primer
gaaacgccg

SEQ ID NO: 1697 - DNA, 9 bp, Artificial Sequence
  Description of Artificial Sequence: Synthetic primer
tgcggcaac

SEQ ID NO: 1698 - DNA, 9 bp, Artificial Sequence
  Description of Artificial Sequence: Synthetic primer
cggcaggtt

SEQ ID NO: 1699 - DNA, 9 bp, Artificial Sequence
  Description of Artificial Sequence: Synthetic primer
aagcgggcg

SEQ ID NO: 1700 - DNA, 9 bp, Artificial Sequence
  Description of Artificial Sequence: Synthetic primer
ctgacggtt

SEQ ID NO: 1701 - DNA, 9 bp, Artificial Sequence
  Description of Artificial Sequence: Synthetic primer
aataccggt

SEQ ID NO: 1702 - DNA, 9 bp, Artificial Sequence
  Description of Artificial Sequence: Synthetic primer
ttcgcgctg

SEQ ID NO: 1703 - DNA, 9 bp, Artificial Sequence
  Description of Artificial Sequence: Synthetic primer
atcggcgtt

SEQ ID NO: 1704 - DNA, 9 bp, Artificial Sequence
  Description of Artificial Sequence: Synthetic primer
acggttatc

SEQ ID NO: 1705 - DNA, 10 bp, Artificial Sequence
  Description of Artificial Sequence: Synthetic primer
ctgcgccagy

SEQ ID NO: 1706 - DNA, 10 bp, Artificial Sequence
  Description of Artificial Sequence: Synthetic primer
cgcgccagca

SEQ ID NO: 1707 - DNA, 10 bp, Artificial Sequence
  Description of Artificial Sequence: Synthetic primer
ggcgatatcg

SEQ ID NO: 1708 - DNA, 10 bp, Artificial Sequence
  Description of Artificial Sequence: Synthetic primer
aacgcgccag

SEQ ID NO: 1709 - DNA, 10 bp, Artificial Sequence
  Description of Artificial Sequence: Synthetic primer
ctggcgcgcg

SEQ ID NO: 1710 - DNA, 10 bp, Artificial Sequence
  Description of Artificial Sequence: Synthetic primer
tgacgccaga

SEQ ID NO: 1711 - DNA, 10 bp, Artificial Sequence
  Description of Artificial Sequence: Synthetic primer
ccagcgccgc

SEQ ID NO: 1712 - DNA, 10 bp, Artificial Sequence
  Description of Artificial Sequence: Synthetic primer
ctggctggcg

SEQ ID NO: 1713 - DNA, 10 bp, Artificial Sequence
  Description of Artificial Sequence: Synthetic primer
tgccgccagy

SEQ ID NO: 1714 - DNA, 10 bp, Artificial Sequence
  Description of Artificial Sequence: Synthetic primer
caggcgctga

SEQ ID NO: 1715 - DNA, 10 bp, Artificial Sequence
  Description of Artificial Sequence: Synthetic primer
ctttcgccag

SEQ ID NO: 1716 - DNA, 10 bp, Artificial Sequence
  Description of Artificial Sequence: Synthetic primer
cgctgacgtt

SEQ ID NO: 1717 - DNA, 10 bp, Artificial Sequence
  Description of Artificial Sequence: Synthetic primer
ccagcggcgt

SEQ ID NO: 1718 - DNA, 9 bp, Artificial Sequence
  Description of Artificial Sequence: Synthetic primer
gcgatacca

SEQ ID NO: 1719 - DNA, 9 bp, Artificial Sequence
  Description of Artificial Sequence: Synthetic primer
tggcgcata

SEQ ID NO: 1720 - DNA, 9 bp, Artificial Sequence
  Description of Artificial Sequence: Synthetic primer
cgcgtaaac

SEQ ID NO: 1721 - DNA, 9 bp, Artificial Sequence
  Description of Artificial Sequence: Synthetic primer
aamgcggca

SEQ ID NO: 1722 - DNA, 9 bp, Artificial Sequence
  Description of Artificial Sequence: Synthetic primer
cgctactgg

SEQ ID NO: 1723 - DNA, 9 bp, Artificial Sequence
  Description of Artificial Sequence: Synthetic primer
gcggtatta

SEQ ID NO: 1724 - DNA, 10 bp, Artificial Sequence
  Description of Artificial Sequence: Synthetic primer
ctgctgccgg

SEQ ID NO: 1725 - DNA, 10 bp, Artificial Sequence
  Description of Artificial Sequence: Synthetic primer
ggtggcggca

SEQ ID NO: 1726 - DNA, 10 bp, Artificial Sequence
  Description of Artificial Sequence: Synthetic primer
cccgccgcca

SEQ ID NO: 1727 - DNA, 7 bp, Artificial Sequence
  Description of Artificial Sequence: Synthetic primer
cgccgta

SEQ ID NO: 1728 - DNA, 8 bp, Artificial Sequence
  Description of Artificial Sequence: Synthetic primer
cattggcg

SEQ ID NO: 1729 - DNA, 8 bp, Artificial Sequence
  Description of Artificial Sequence: Synthetic primer
ccggcata

SEQ ID NO: 1730 - DNA, 8 bp, Artificial Sequence
  Description of Artificial Sequence: Synthetic primer
cgcgtcat

SEQ ID NO: 1731 - DNA, 8 bp, Artificial Sequence
  Description of Artificial Sequence: Synthetic primer
ggttacgc

SEQ ID NO: 1732 - DNA, 9 bp, Artificial Sequence
  Description of Artificial Sequence: Synthetic primer
atgctgccg

SEQ ID NO: 1733 - DNA, 9 bp, Artificial Sequence
  Description of Artificial Sequence: Synthetic primer
atcgccttc

SEQ ID NO: 1734 - DNA, 9 bp, Artificial Sequence
  Description of Artificial Sequence: Synthetic primer
cttcgccat

SEQ ID NO: 1735 - DNA, 9 bp, Artificial Sequence
  Description of Artificial Sequence: Synthetic primer
tgccgggat

SEQ ID NO: 1736 - DNA, 9 bp, Artificial Sequence
  Description of Artificial Sequence: Synthetic primer
cgtcagcac

SEQ ID NO: 1737 - DNA, 9 bp, Artificial Sequence
  Description of Artificial Sequence: Synthetic primer
tcagcccgg

SEQ ID NO: 1738 - DNA, 9 bp, Artificial Sequence
  Description of Artificial Sequence: Synthetic primer
attacgcca

SEQ ID NO: 1739 - DNA, 9 bp, Artificial Sequence
  Description of Artificial Sequence: Synthetic primer
tggcatcgc

SEQ ID NO: 1740 - DNA, 9 bp, Artificial Sequence
  Description of Artificial Sequence: Synthetic primer
tctctggcg

SEQ ID NO: 1741 - DNA, 9 bp, Artificial Sequence
  Description of Artificial Sequence: Synthetic primer
tgcggtgat

SEQ ID NO: 1742 - DNA, 9 bp, Artificial Sequence
  Description of Artificial Sequence: Synthetic primer
acgtctggc

SEQ ID NO: 1743 - DNA, 10 bp, Artificial Sequence
  Description of Artificial Sequence: Synthetic primer
gccgccagac

SEQ ID NO: 1744 - DNA, 10 bp, Artificial Sequence
  Description of Artificial Sequence: Synthetic primer
gattggcgcg

SEQ ID NO: 1745 - DNA, 10 bp, Artificial Sequence
  Description of Artificial Sequence: Synthetic primer
cgctggaaga

SEQ ID NO: 1746 - DNA, 10 bp, Artificial Sequence
  Description of Artificial Sequence: Synthetic primer
catccgccag

SEQ ID NO: 1747 - DNA, 10 bp, Artificial Sequence
  Description of Artificial Sequence: Synthetic primer
cagcgaactg

SEQ ID NO: 1748 - DNA, 10 bp, Artificial Sequence
  Description of Artificial Sequence: Synthetic primer
gattatcgcc

SEQ ID NO: 1749 - DNA, 10 bp, Artificial Sequence
  Description of Artificial Sequence: Synthetic primer
cgcgtctggc

SEQ ID NO: 1750 - DNA, 10 bp, Artificial Sequence
  Description of Artificial Sequence: Synthetic primer
cgatctggcg

SEQ ID NO: 1751 - DNA, 10 bp, Artificial Sequence
  Description of Artificial Sequence: Synthetic primer
cgccagcagg

SEQ ID NO: 1752 - DNA, 10 bp, Artificial Sequence
  Description of Artificial Sequence: Synthetic primer
tttcgccagt

SEQ ID NO: 1753 - DNA, 10 bp, Artificial Sequence
  Description of Artificial Sequence: Synthetic primer
cgctgcgcca

SEQ ID NO: 1754 - DNA, 10 bp, Artificial Sequence
  Description of Artificial Sequence: Synthetic primer
gatcagcgcc

SEQ ID NO: 1755 - DNA, 10 bp, Artificial Sequence
  Description of Artificial Sequence: Synthetic primer
acgctggaag

SEQ ID NO: 1756 - DNA, 9 bp, Artificial Sequence
  Description of Artificial Sequence: Synthetic primer
cgcgcagct

SEQ ID NO: 1757 - DNA, 9 bp, Artificial Sequence
  Description of Artificial Sequence: Synthetic primer
gcgtggcgt

SEQ ID NO: 1758 - DNA, 9 bp, Artificial Sequence
  Description of Artificial Sequence: Synthetic primer
ccgcaaccg

SEQ ID NO: 1759 - DNA, 9 bp, Artificial Sequence
  Description of Artificial Sequence: Synthetic primer
gatatcgtc

SEQ ID NO: 1760 - DNA, 9 bp, Artificial Sequence
  Description of Artificial Sequence: Synthetic primer
cgttaatgg

SEQ ID NO: 1761 - DNA, 9 bp, Artificial Sequence
  Description of Artificial Sequence: Synthetic primer
aaccggtaa

SEQ ID NO: 1762 - DNA, 9 bp, Artificial Sequence
  Description of Artificial Sequence: Synthetic primer
cagcgttac

SEQ ID NO: 1763 - DNA, 9 bp, Artificial Sequence
  Description of Artificial Sequence: Synthetic primer
cagacgttc

SEQ ID NO: 1764 - DNA, 9 bp, Artificial Sequence
  Description of Artificial Sequence: Synthetic primer
ccggaaggt

SEQ ID NO: 1765 - DNA, 10 bp, Artificial Sequence
  Description of Artificial Sequence: Synthetic primer
attgcctgat

SEQ ID NO: 1766 - DNA, 10 bp, Artificial Sequence
  Description of Artificial Sequence: Synthetic primer
tttttccgcc

SEQ ID NO: 1767 - DNA, 8 bp, Artificial Sequence
  Description of Artificial Sequence: Synthetic primer
gcggtttc

SEQ ID NO: 1768 - DNA, 8 bp, Artificial Sequence
  Description of Artificial Sequence: Synthetic primer
cgctaacc

SEQ ID NO: 1769 - DNA, 8 bp, Artificial Sequence
  Description of Artificial Sequence: Synthetic primer
cataccgg

SEQ ID NO: 1770 - DNA, 8 bp, Artificial Sequence
  Description of Artificial Sequence: Synthetic primer
ggcgtatc

SEQ ID NO: 1771 - DNA, 8 bp, Artificial Sequence
  Description of Artificial Sequence: Synthetic primer
accgctat

SEQ ID NO: 1772 - DNA, 8 bp, Artificial Sequence
  Description of Artificial Sequence: Synthetic primer
cccgcgat

SEQ ID NO: 1773 - DNA, 8 bp, Artificial Sequence
  Description of Artificial Sequence: Synthetic primer
cgtagcgg

SEQ ID NO: 1774 - DNA, 9 bp, Artificial Sequence
  Description of Artificial Sequence: Synthetic primer
cgctgatga

SEQ ID NO: 1775 - DNA, 9 bp, Artificial Sequence
  Description of Artificial Sequence: Synthetic primer
tgcgtcagc

SEQ ID NO: 1776 - DNA, 9 bp, Artificial Sequence
  Description of Artificial Sequence: Synthetic primer
ttttgcggc

SEQ ID NO: 1777 - DNA, 9 bp, Artificial Sequence
  Description of Artificial Sequence: Synthetic primer
ccagcgtgt

SEQ ID NO: 1778 - DNA, 9 bp, Artificial Sequence
  Description of Artificial Sequence: Synthetic primer
cacgctggt

SEQ ID NO: 1779 - DNA, 9 bp, Artificial Sequence
  Description of Artificial Sequence: Synthetic primer
gcttcagcg

SEQ ID NO: 1780 - DNA, 9 bp, Artificial Sequence
  Description of Artificial Sequence: Synthetic primer
ttgcggcag

SEQ ID NO: 1781 - DNA, 12 bp, Artificial Sequence
  Description of Artificial Sequence: Synthetic primer
tagttaatccga

SEQ ID NO: 1782 - DNA, 12 bp, Artificial Sequence
  Description of Artificial Sequence: Synthetic primer
cggattaactat

SEQ ID NO: 1783 - DNA, 12 bp, Artificial Sequence
  Description of Artificial Sequence: Synthetic primer
tagcgactctgc

SEQ ID NO: 1784 - DNA, 12 bp, Artificial Sequence
  Description of Artificial Sequence: Synthetic primer
gatatttgtaga

SEQ ID NO: 1785 - DNA, 12 bp, Artificial Sequence
  Description of Artificial Sequence: Synthetic primer
ttactatagtag

SEQ ID NO: 1786 - DNA, 12 bp, Artificial Sequence
  Description of Artificial Sequence: Synthetic primer
atactccaacct

SEQ ID NO: 1787 - DNA, 12 bp, Artificial Sequence
  Description of Artificial Sequence: Synthetic primer
actatagtagtt

SEQ ID NO: 1788 - DNA, 12 bp, Artificial Sequence
  Description of Artificial Sequence: Synthetic primer
gatagcatcaca

SEQ ID NO: 1789 - DNA, 12 bp, Artificial Sequence
  Description of Artificial Sequence: Synthetic primer
gctatttcaatc

SEQ ID NO: 1790 - DNA, 12 bp, Artificial Sequence
  Description of Artificial Sequence: Synthetic primer
tgaccatcctct

SEQ ID NO: 1791 - DNA, 12 bp, Artificial Sequence
  Description of Artificial Sequence: Synthetic primer
tagacttggttt

SEQ ID NO: 1792 - DNA, 12 bp, Artificial Sequence
  Description of Artificial Sequence: Synthetic primer
tgctaaaacctc

SEQ ID NO: 1793 - DNA, 12 bp, Artificial Sequence
  Description of Artificial Sequence: Synthetic primer
aacctttcatgt

SEQ ID NO: 1794 - DNA, 12 bp, Artificial Sequence
  Description of Artificial Sequence: Synthetic primer
gatagaaagctt

SEQ ID NO: 1795 - DNA, 12 bp, Artificial Sequence
  Description of Artificial Sequence: Synthetic primer
atagatgagatg

SEQ ID NO: 1796 - DNA, 12 bp, Artificial Sequence
  Description of Artificial Sequence: Synthetic primer
taatgctagttt

SEQ ID NO: 1797 - DNA, 12 bp, Artificial Sequence
  Description of Artificial Sequence: Synthetic primer
taggttctgtgc

SEQ ID NO: 1798 - DNA, 12 bp, Artificial Sequence
  Description of Artificial Sequence: Synthetic primer
gtagatataata

SEQ ID NO: 1799 - DNA, 12 bp, Artificial Sequence
  Description of Artificial Sequence: Synthetic primer
aaaaacttactc

SEQ ID NO: 1800 - DNA, 12 bp, Artificial Sequence
  Description of Artificial Sequence: Synthetic primer
gtagaaatgtta

SEQ ID NO: 1801 - DNA, 12 bp, Artificial Sequence
  Description of Artificial Sequence: Synthetic primer
ataaaactctat

SEQ ID NO: 1802 - DNA, 12 bp, Artificial Sequence
  Description of Artificial Sequence: Synthetic primer
tgatgtacaaat

SEQ ID NO: 1803 - DNA, 10 bp, Artificial Sequence
  Description of Artificial Sequence: Synthetic primer
tactaataty

SEQ ID NO: 1804 - DNA, 10 bp, Artificial Sequence
  Description of Artificial Sequence: Synthetic primer
aagatttagc

SEQ ID NO: 1805 - DNA, 10 bp, Artificial Sequence
  Description of Artificial Sequence: Synthetic primer
agctataaca

SEQ ID NO: 1806 - DNA, 10 bp, Artificial Sequence
  Description of Artificial Sequence: Synthetic primer
ggtgatattg

SEQ ID NO: 1807 - DNA, 10 bp, Artificial Sequence
  Description of Artificial Sequence: Synthetic primer
accagctaaa

SEQ ID NO: 1808 - DNA, 10 bp, Artificial Sequence
  Description of Artificial Sequence: Synthetic primer
accataacca

SEQ ID NO: 1809 - DNA, 10 bp, Artificial Sequence
  Description of Artificial Sequence: Synthetic primer
gcgatatttt

SEQ ID NO: 1810 - DNA, 10 bp, Artificial Sequence
  Description of Artificial Sequence: Synthetic primer
gatggtttag

SEQ ID NO: 1811 - DNA, 11 bp, Artificial Sequence
  Description of Artificial Sequence: Synthetic primer
ttatctaaaag

SEQ ID NO: 1812 - DNA, 11 bp, Artificial Sequence
  Description of Artificial Sequence: Synthetic primer
caatattatca

SEQ ID NO: 1813 - DNA, 10 bp, Artificial Sequence
  Description of Artificial Sequence: Synthetic primer
ttttgataaa

SEQ ID NO: 1814 - DNA, 10 bp, Artificial Sequence
  Description of Artificial Sequence: Synthetic primer
atcatcaaaa

SEQ ID NO: 1815 - DNA, 9 bp, Artificial Sequence
  Description of Artificial Sequence: Synthetic primer
caactatag

SEQ ID NO: 1816 - DNA, 10 bp, Artificial Sequence
  Description of Artificial Sequence: Synthetic primer
aatatcatca

SEQ ID NO: 1817 - DNA, 10 bp, Artificial Sequence
  Description of Artificial Sequence: Synthetic primer
tttgataaag

SEQ ID NO: 1818 - DNA, 10 bp, Artificial Sequence
  Description of Artificial Sequence: Synthetic primer
tctttatcaa

SEQ ID NO: 1819 - DNA, 12 bp, Artificial Sequence
  Description of Artificial Sequence: Synthetic primer
tatatccagcaa

SEQ ID NO: 1820 - DNA, 12 bp, Artificial Sequence
  Description of Artificial Sequence: Synthetic primer
ataattatatcc

SEQ ID NO: 1821 - DNA, 12 bp, Artificial Sequence
  Description of Artificial Sequence: Synthetic primer
tagtttccataa

SEQ ID NO: 1822 - DNA, 12 bp, Artificial Sequence
  Description of Artificial Sequence: Synthetic primer
ttattggctatt

SEQ ID NO: 1823 - DNA, 12 bp, Artificial Sequence
  Description of Artificial Sequence: Synthetic primer
ctttttctacaa

SEQ ID NO: 1824 - DNA, 12 bp, Artificial Sequence
  Description of Artificial Sequence: Synthetic primer
taatgcttcttt

SEQ ID NO: 1825 - DNA, 12 bp, Artificial Sequence
  Description of Artificial Sequence: Synthetic primer
actccaaaatat

SEQ ID NO: 1826 - DNA, 12 bp, Artificial Sequence
  Description of Artificial Sequence: Synthetic primer
ctttgtgtttga

SEQ ID NO: 1827 - DNA, 12 bp, Artificial Sequence
  Description of Artificial Sequence: Synthetic primer
aaatgtacttct

SEQ ID NO: 1828 - DNA, 12 bp, Artificial Sequence
  Description of Artificial Sequence: Synthetic primer
aatctttttatc

SEQ ID NO: 1829 - DNA, 12 bp, Artificial Sequence
  Description of Artificial Sequence: Synthetic primer
ctatgttaaaaa

SEQ ID NO: 1830 - DNA, 12 bp, Artificial Sequence
  Description of Artificial Sequence: Synthetic primer
tatgataaagat

SEQ ID NO: 1831 - DNA, 12 bp, Artificial Sequence
  Description of Artificial Sequence: Synthetic primer
tctatataaaat

SEQ ID NO: 1832 - DNA, 12 bp, Artificial Sequence
  Description of Artificial Sequence: Synthetic primer
ttaaaaaactta

SEQ ID NO: 1833 - DNA, 12 bp, Artificial Sequence
  Description of Artificial Sequence: Synthetic primer
gttattttatat

SEQ ID NO: 1834 - DNA, 12 bp, Artificial Sequence
  Description of Artificial Sequence: Synthetic primer
tataatcttttt

SEQ ID NO: 1835 - DNA, 11 bp, Artificial Sequence
  Description of Artificial Sequence: Synthetic primer
atctatagcta

SEQ ID NO: 1836 - DNA, 10 bp, Artificial Sequence
  Description of Artificial Sequence: Synthetic primer
ttagcgatat

SEQ ID NO: 1837 - DNA, 12 bp, Artificial Sequence
  Description of Artificial Sequence: Synthetic primer
agaaaaactaaa

SEQ ID NO: 1838 - DNA, 12 bp, Artificial Sequence
  Description of Artificial Sequence: Synthetic primer
aatttttaatca

SEQ ID NO: 1839 - DNA, 10 bp, Artificial Sequence
  Description of Artificial Sequence: Synthetic primer
tatmgctaaa

SEQ ID NO: 1840 - DNA, 12 bp, Artificial Sequence
  Description of Artificial Sequence: Synthetic primer
ttttagtttttc

SEQ ID NO: 1841 - DNA, 10 bp, Artificial Sequence
  Description of Artificial Sequence: Synthetic primer
ctaatattat

SEQ ID NO: 1842 - DNA, 9 bp, Artificial Sequence
  Description of Artificial Sequence: Synthetic primer
tatcgccaa

SEQ ID NO: 1843 - DNA, 10 bp, Artificial Sequence
  Description of Artificial Sequence: Synthetic primer
tatcaaactt

SEQ ID NO: 1844 - DNA, 10 bp, Artificial Sequence
  Description of Artificial Sequence: Synthetic primer
tgttgatggt

SEQ ID NO: 1845 - DNA, 10 bp, Artificial Sequence
  Description of Artificial Sequence: Synthetic primer
aytatcagca

SEQ ID NO: 1846 - DNA, 10 bp, Artificial Sequence
  Description of Artificial Sequence: Synthetic primer
aatttagcta

SEQ ID NO: 1847 - DNA, 10 bp, Artificial Sequence
  Description of Artificial Sequence: Synthetic primer
tagtagtatt

SEQ ID NO: 1848 - DNA, 10 bp, Artificial Sequence
  Description of Artificial Sequence: Synthetic primer
aactatcaat

SEQ ID NO: 1849 - DNA, 10 bp, Artificial Sequence
  Description of Artificial Sequence: Synthetic primer
aaagttgcta

SEQ ID NO: 1850 - DNA, 10 bp, Artificial Sequence
  Description of Artificial Sequence: Synthetic primer
tttagctgta

SEQ ID NO: 1851 - DNA, 10 bp, Artificial Sequence
  Description of Artificial Sequence: Synthetic primer
caatatcttc

SEQ ID NO: 1852 - DNA, 10 bp, Artificial Sequence
  Description of Artificial Sequence: Synthetic primer
ataagctttg

SEQ ID NO: 1853 - DNA, 10 bp, Artificial Sequence
  Description of Artificial Sequence: Synthetic primer
aamactatca

SEQ ID NO: 1854 - DNA, 10 bp, Artificial Sequence
  Description of Artificial Sequence: Synthetic primer
cttgatgata

SEQ ID NO: 1855 - DNA, 10 bp, Artificial Sequence
  Description of Artificial Sequence: Synthetic primer
atacttatct

SEQ ID NO: 1856 - DNA, 10 bp, Artificial Sequence
  Description of Artificial Sequence: Synthetic primer
atactatcaa

SEQ ID NO: 1857 - DNA, 12 bp, Artificial Sequence
  Description of Artificial Sequence: Synthetic primer
gttttgaaaaat

SEQ ID NO: 1858 - DNA, 11 bp, Artificial Sequence
  Description of Artificial Sequence: Synthetic primer
aaagtagctat

SEQ ID NO: 1859 - DNA, 11 bp, Artificial Sequence
  Description of Artificial Sequence: Synthetic primer
tatcaaaaggt

SEQ ID NO: 1860 - DNA, 11 bp, Artificial Sequence
  Description of Artificial Sequence: Synthetic primer
ttgcttggtta

SEQ ID NO: 1861 - DNA, 11 bp, Artificial Sequence
  Description of Artificial Sequence: Synthetic primer
gctttagataa

SEQ ID NO: 1862 - DNA, 11 bp, Artificial Sequence
  Description of Artificial Sequence: Synthetic primer
agtattctcta

SEQ ID NO: 1863 - DNA, 11 bp, Artificial Sequence
  Description of Artificial Sequence: Synthetic primer
tattgctatag

SEQ ID NO: 1864 - DNA, 10 bp, Artificial Sequence
  Description of Artificial Sequence: Synthetic primer
gctaaagata

SEQ ID NO: 1865 - DNA, 10 bp, Artificial Sequence
  Description of Artificial Sequence: Synthetic primer
gataagctta

SEQ ID NO: 1866 - DNA, 11 bp, Artificial Sequence
  Description of Artificial Sequence: Synthetic primer
gactatcaaaa

SEQ ID NO: 1867 - DNA, 11 bp, Artificial Sequence
  Description of Artificial Sequence: Synthetic primer
gctaaaaaagc

SEQ ID NO: 1868 - DNA, 11 bp, Artificial Sequence
  Description of Artificial Sequence: Synthetic primer
gctatagattt

SEQ ID NO: 1869 - DNA, 10 bp, Artificial Sequence
  Description of Artificial Sequence: Synthetic primer
agctaaagat

SEQ ID NO: 1870 - DNA, 10 bp, Artificial Sequence
  Description of Artificial Sequence: Synthetic primer
tatctaaagm

SEQ ID NO: 1871 - DNA, 10 bp, Artificial Sequence
  Description of Artificial Sequence: Synthetic primer
tagytttagc

SEQ ID NO: 1872 - DNA, 10 bp, Artificial Sequence
  Description of Artificial Sequence: Synthetic primer
gctatagttg

SEQ ID NO: 1873 - DNA, 11 bp, Artificial Sequence
  Description of Artificial Sequence: Synthetic primer
ataactatcaa

SEQ ID NO: 1874 - DNA, 10 bp, Artificial Sequence
  Description of Artificial Sequence: Synthetic primer
tttagctaaa

SEQ ID NO: 1875 - DNA, 10 bp, Artificial Sequence
  Description of Artificial Sequence: Synthetic primer
attagctata

SEQ ID NO: 1876 - DNA, 10 bp, Artificial Sequence
  Description of Artificial Sequence: Synthetic primer
tctttagcta

SEQ ID NO: 1877 - DNA, 10 bp, Artificial Sequence
  Description of Artificial Sequence: Synthetic primer
gatattacta

SEQ ID NO: 1878 - DNA, 10 bp, Artificial Sequence
  Description of Artificial Sequence: Synthetic primer
ttgctatagc

SEQ ID NO: 1879 - DNA, 10 bp, Artificial Sequence
  Description of Artificial Sequence: Synthetic primer
cttctaaagc

SEQ ID NO: 1880 - DNA, 10 bp, Artificial Sequence
  Description of Artificial Sequence: Synthetic primer
ctttatcaag

SEQ ID NO: 1881 - DNA, 10 bp, Artificial Sequence
  Description of Artificial Sequence: Synthetic primer
gtatcaaaga

SEQ ID NO: 1882 - DNA, 11 bp, Artificial Sequence
  Description of Artificial Sequence: Synthetic primer
tagaaatattg

SEQ ID NO: 1883 - DNA, 10 bp, Artificial Sequence
  Description of Artificial Sequence: Synthetic primer
ctactaatat

SEQ ID NO: 1884 - DNA, 10 bp, Artificial Sequence
  Description of Artificial Sequence: Synthetic primer
cataactata

SEQ ID NO: 1885 - DNA, 10 bp, Artificial Sequence
  Description of Artificial Sequence: Synthetic primer
ttatcaaaat

SEQ ID NO: 1886 - DNA, 10 bp, Artificial Sequence
  Description of Artificial Sequence: Synthetic primer
tttttgatta

SEQ ID NO: 1887 - DNA, 9 bp, Artificial Sequence
  Description of Artificial Sequence: Synthetic primer
taccaacta

SEQ ID NO: 1888 - DNA, 10 bp, Artificial Sequence
  Description of Artificial Sequence: Synthetic primer
taaatctaaa

SEQ ID NO: 1889 - DNA, 10 bp, Artificial Sequence
  Description of Artificial Sequence: Synthetic primer
ttatcataaa

SEQ ID NO: 1890 - DNA, 10 bp, Artificial Sequence
  Description of Artificial Sequence: Synthetic primer
tttgatakta

SEQ ID NO: 1891 - DNA, 10 bp, Artificial Sequence
  Description of Artificial Sequence: Synthetic primer
ttggtaaaaa

SEQ ID NO: 1892 - DNA, 10 bp, Artificial Sequence
  Description of Artificial Sequence: Synthetic primer
tttatagctt

SEQ ID NO: 1893 - DNA, 10 bp, Artificial Sequence
  Description of Artificial Sequence: Synthetic primer
ataatatcta

SEQ ID NO: 1894 - DNA, 10 bp, Artificial Sequence
  Description of Artificial Sequence: Synthetic primer
tgatgataat

SEQ ID NO: 1895 - DNA, 10 bp, Artificial Sequence
  Description of Artificial Sequence: Synthetic primer
tattgatgat

SEQ ID NO: 1896 - DNA, 10 bp, Artificial Sequence
  Description of Artificial Sequence: Synthetic primer
tatagctata

SEQ ID NO: 1897 - DNA, 10 bp, Artificial Sequence
  Description of Artificial Sequence: Synthetic primer
agatattatc

SEQ ID NO: 1898 - DNA, 10 bp, Artificial Sequence
  Description of Artificial Sequence: Synthetic primer
ttgataatct

SEQ ID NO: 1899 - DNA, 10 bp, Artificial Sequence
  Description of Artificial Sequence: Synthetic primer
tagctataat

SEQ ID NO: 1900 - DNA, 10 bp, Artificial Sequence
  Description of Artificial Sequence: Synthetic primer
gcwttagcaa

SEQ ID NO: 1901 - DNA, 10 bp, Artificial Sequence
  Description of Artificial Sequence: Synthetic primer
tagtattatc

SEQ ID NO: 1902 - DNA, 10 bp, Artificial Sequence
  Description of Artificial Sequence: Synthetic primer
ttaccaatag

SEQ ID NO: 1903 - DNA, 10 bp, Artificial Sequence
  Description of Artificial Sequence: Synthetic primer
ctttagcacc

SEQ ID NO: 1904 - DNA, 10 bp, Artificial Sequence
  Description of Artificial Sequence: Synthetic primer
gcaactattg

SEQ ID NO: 1905 - DNA, 11 bp, Artificial Sequence
  Description of Artificial Sequence: Synthetic primer
taatgctgata

SEQ ID NO: 1906 - DNA, 10 bp, Artificial Sequence
  Description of Artificial Sequence: Synthetic primer
tttgataatm

SEQ ID NO: 1907 - DNA, 10 bp, Artificial Sequence
  Description of Artificial Sequence: Synthetic primer
takttgataa

SEQ ID NO: 1908 - DNA, 10 bp, Artificial Sequence
  Description of Artificial Sequence: Synthetic primer
attgctaaag

SEQ ID NO: 1909 - DNA, 10 bp, Artificial Sequence
  Description of Artificial Sequence: Synthetic primer
ttaagcttat

SEQ ID NO: 1910 - DNA, 11 bp, Artificial Sequence
  Description of Artificial Sequence: Synthetic primer
tgattttgata

SEQ ID NO: 1911 - DNA, 10 bp, Artificial Sequence
  Description of Artificial Sequence: Synthetic primer
taatatcagc

SEQ ID NO: 1912 - DNA, 10 bp, Artificial Sequence
  Description of Artificial Sequence: Synthetic primer
cagctattgc

SEQ ID NO: 1913 - DNA, 10 bp, Artificial Sequence
  Description of Artificial Sequence: Synthetic primer
agtatcacca

SEQ ID NO: 1914 - DNA, 10 bp, Artificial Sequence
  Description of Artificial Sequence: Synthetic primer
gttggtgata

SEQ ID NO: 1915 - DNA, 10 bp, Artificial Sequence
  Description of Artificial Sequence: Synthetic primer
ctaaagcttg

SEQ ID NO: 1916 - DNA, 10 bp, Artificial Sequence
  Description of Artificial Sequence: Synthetic primer
gcaatagcta

SEQ ID NO: 1917 - DNA, 10 bp, Artificial Sequence
  Description of Artificial Sequence: Synthetic primer
gctaataaaa

SEQ ID NO: 1918 - DNA, 10 bp, Artificial Sequence
  Description of Artificial Sequence: Synthetic primer
atattttagc

SEQ ID NO: 1919 - DNA, 10 bp, Artificial Sequence
  Description of Artificial Sequence: Synthetic primer
ttatctaata

SEQ ID NO: 1920 - DNA, 10 bp, Artificial Sequence
  Description of Artificial Sequence: Synthetic primer
atataactaa

SEQ ID NO: 1921 - DNA, 10 bp, Artificial Sequence
  Description of Artificial Sequence: Synthetic primer
tcaaagatat

SEQ ID NO: 1922 - DNA, 10 bp, Artificial Sequence
  Description of Artificial Sequence: Synthetic primer
taaaccaata

SEQ ID NO: 1923 - DNA, 10 bp, Artificial Sequence
  Description of Artificial Sequence: Synthetic primer
agcttcttta

SEQ ID NO: 1924 - DNA, 10 bp, Artificial Sequence
  Description of Artificial Sequence: Synthetic primer
attaaagcta

SEQ ID NO: 1925 - DNA, 10 bp, Artificial Sequence
  Description of Artificial Sequence: Synthetic primer
gctgctgata

SEQ ID NO: 1926 - DNA, 10 bp, Artificial Sequence
  Description of Artificial Sequence: Synthetic primer
atataagtta

SEQ ID NO: 1927 - DNA, 10 bp, Artificial Sequence
  Description of Artificial Sequence: Synthetic primer
atagatgata

SEQ ID NO: 1928 - DNA, 10 bp, Artificial Sequence
  Description of Artificial Sequence: Synthetic primer
tatcaaaagt

SEQ ID NO: 1929 - DNA, 10 bp, Artificial Sequence
  Description of Artificial Sequence: Synthetic primer
atatcttgat

SEQ ID NO: 1930 - DNA, 10 bp, Artificial Sequence
  Description of Artificial Sequence: Synthetic primer
ttgctaaaac

SEQ ID NO: 1931 - DNA, 10 bp, Artificial Sequence
  Description of Artificial Sequence: Synthetic primer
aaagatggtg

SEQ ID NO: 1932 - DNA, 10 bp, Artificial Sequence
  Description of Artificial Sequence: Synthetic primer
tattatcagt

SEQ ID NO: 1933 - DNA, 11 bp, Artificial Sequence
  Description of Artificial Sequence: Synthetic primer
ttgctaaagca

SEQ ID NO: 1934 - DNA, 11 bp, Artificial Sequence
  Description of Artificial Sequence: Synthetic primer
gataaaaccat

SEQ ID NO: 1935 - DNA, 11 bp, Artificial Sequence
  Description of Artificial Sequence: Synthetic primer
atattgctaat

SEQ ID NO: 1936 - DNA, 10 bp, Artificial Sequence
  Description of Artificial Sequence: Synthetic primer
ttttttagct

SEQ ID NO: 1937 - DNA, 10 bp, Artificial Sequence
  Description of Artificial Sequence: Synthetic primer
tgatattgat

SEQ ID NO: 1938 - DNA, 10 bp, Artificial Sequence
  Description of Artificial Sequence: Synthetic primer
tgataaagtt

SEQ ID NO: 1939 - DNA, 10 bp, Artificial Sequence
  Description of Artificial Sequence: Synthetic primer
tttaccaata

SEQ ID NO: 1940 - DNA, 10 bp, Artificial Sequence
  Description of Artificial Sequence: Synthetic primer
agctaaagca

SEQ ID NO: 1941 - DNA, 10 bp, Artificial Sequence
  Description of Artificial Sequence: Synthetic primer
tttagataag

SEQ ID NO: 1942 - DNA, 10 bp, Artificial Sequence
  Description of Artificial Sequence: Synthetic primer
agtattatca

SEQ ID NO: 1943 - DNA, 10 bp, Artificial Sequence
  Description of Artificial Sequence: Synthetic primer
tgatttagmt

SEQ ID NO: 1944 - DNA, 10 bp, Artificial Sequence
  Description of Artificial Sequence: Synthetic primer
tattatcaac

SEQ ID NO: 1945 - DNA, 10 bp, Artificial Sequence
  Description of Artificial Sequence: Synthetic primer
aatwgctgat

SEQ ID NO: 1946 - DNA, 10 bp, Artificial Sequence
  Description of Artificial Sequence: Synthetic primer
agtatagata

SEQ ID NO: 1947 - DNA, 10 bp, Artificial Sequence
  Description of Artificial Sequence: Synthetic primer
cttattgata

SEQ ID NO: 1948 - DNA, 10 bp, Artificial Sequence
  Description of Artificial Sequence: Synthetic primer
tatagatatc

SEQ ID NO: 1949 - DNA, 10 bp, Artificial Sequence
  Description of Artificial Sequence: Synthetic primer
ttatctatag

SEQ ID NO: 1950 - DNA, 10 bp, Artificial Sequence
  Description of Artificial Sequence: Synthetic primer
atataactct

SEQ ID NO: 1951 - DNA, 10 bp, Artificial Sequence
  Description of Artificial Sequence: Synthetic primer
tggtattggt

SEQ ID NO: 1952 - DNA, 11 bp, Artificial Sequence
  Description of Artificial Sequence: Synthetic primer
cttttttatca

SEQ ID NO: 1953 - DNA, 11 bp, Artificial Sequence
  Description of Artificial Sequence: Synthetic primer
tacttctttta

SEQ ID NO: 1954 - DNA, 10 bp, Artificial Sequence
  Description of Artificial Sequence: Synthetic primer
agcattagct

SEQ ID NO: 1955 - DNA, 10 bp, Artificial Sequence
  Description of Artificial Sequence: Synthetic primer
tgataagttt

SEQ ID NO: 1956 - DNA, 10 bp, Artificial Sequence
  Description of Artificial Sequence: Synthetic primer
tatatactct

SEQ ID NO: 1957 - DNA, 10 bp, Artificial Sequence
  Description of Artificial Sequence: Synthetic primer
tcaccattat

SEQ ID NO: 1958 - DNA, 10 bp, Artificial Sequence
  Description of Artificial Sequence: Synthetic primer
aatatctatc

SEQ ID NO: 1959 - DNA, 10 bp, Artificial Sequence
  Description of Artificial Sequence: Synthetic primer
atatcawtac

SEQ ID NO: 1960 - DNA, 10 bp, Artificial Sequence
  Description of Artificial Sequence: Synthetic primer
gatttatcta

SEQ ID NO: 1961 - DNA, 10 bp, Artificial Sequence
  Description of Artificial Sequence: Synthetic primer
agcaacttta

SEQ ID NO: 1962 - DNA, 10 bp, Artificial Sequence
  Description of Artificial Sequence: Synthetic primer
ttagctttga

SEQ ID NO: 1963 - DNA, 10 bp, Artificial Sequence
  Description of Artificial Sequence: Synthetic primer
ttgatggtga

SEQ ID NO: 1964 - DNA, 10 bp, Artificial Sequence
  Description of Artificial Sequence: Synthetic primer
taaatcaagc

SEQ ID NO: 1965 - DNA, 10 bp, Artificial Sequence
  Description of Artificial Sequence: Synthetic primer
tttttcgata

SEQ ID NO: 1966 - DNA, 10 bp, Artificial Sequence
  Description of Artificial Sequence: Synthetic primer
ctcatctaaa

SEQ ID NO: 1967 - DNA, 10 bp, Artificial Sequence
  Description of Artificial Sequence: Synthetic primer
tctagagaat

SEQ ID NO: 1968 - DNA, 10 bp, Artificial Sequence
  Description of Artificial Sequence: Synthetic primer
taatataccg

SEQ ID NO: 1969 - DNA, 10 bp, Artificial Sequence
  Description of Artificial Sequence: Synthetic primer
attatcggta

SEQ ID NO: 1970 - DNA, 10 bp, Artificial Sequence
  Description of Artificial Sequence: Synthetic primer
taataccgat

SEQ ID NO: 1971 - DNA, 12 bp, Artificial Sequence
  Description of Artificial Sequence: Synthetic primer
taatattagtat

SEQ ID NO: 1972 - DNA, 10 bp, Artificial Sequence
  Description of Artificial Sequence: Synthetic primer
aatattaccg

SEQ ID NO: 1973 - DNA, 10 bp, Artificial Sequence
  Description of Artificial Sequence: Synthetic primer
cggtaaaact

SEQ ID NO: 1974 - DNA, 12 bp, Artificial Sequence
  Description of Artificial Sequence: Synthetic primer
tctaatatatta

SEQ ID NO: 1975 - DNA, 12 bp, Artificial Sequence
  Description of Artificial Sequence: Synthetic primer
aatactaatatt

SEQ ID NO: 1976 - DNA, 12 bp, Artificial Sequence
  Description of Artificial Sequence: Synthetic primer
atattagtattt

SEQ ID NO: 1977 - DNA, 12 bp, Artificial Sequence
  Description of Artificial Sequence: Synthetic primer
tttatctataat

SEQ ID NO: 1978 - DNA, 10 bp, Artificial Sequence
  Description of Artificial Sequence: Synthetic primer
tattgcgata

SEQ ID NO: 1979 - DNA, 10 bp, Artificial Sequence
  Description of Artificial Sequence: Synthetic primer
cggtaataat

SEQ ID NO: 1980 - DNA, 11 bp, Artificial Sequence
  Description of Artificial Sequence: Synthetic primer
tagtaatacta

SEQ ID NO: 1981 - DNA, 11 bp, Artificial Sequence
  Description of Artificial Sequence: Synthetic primer
gataatactat

SEQ ID NO: 1982 - DNA, 12 bp, Artificial Sequence
  Description of Artificial Sequence: Synthetic primer
aaaaaaggtgat

SEQ ID NO: 1983 - DNA, 10 bp, Artificial Sequence
  Description of Artificial Sequence: Synthetic primer
tattacgtaa

SEQ ID NO: 1984 - DNA, 12 bp, Artificial Sequence
  Description of Artificial Sequence: Synthetic primer
ttattagtaata

SEQ ID NO: 1985 - DNA, 11 bp, Artificial Sequence
  Description of Artificial Sequence: Synthetic primer
tactaatatta

SEQ ID NO: 1986 - DNA, 10 bp, Artificial Sequence
  Description of Artificial Sequence: Synthetic primer
ctatattacc

SEQ ID NO: 1987 - DNA, 12 bp, Artificial Sequence
  Description of Artificial Sequence: Synthetic primer
ttttatctaaat

SEQ ID NO: 1988 - DNA, 10 bp, Artificial Sequence
  Description of Artificial Sequence: Synthetic primer
cggtaaaata

SEQ ID NO: 1989 - DNA, 11 bp, Artificial Sequence
  Description of Artificial Sequence: Synthetic primer
tagtattatya

SEQ ID NO: 1990 - DNA, 12 bp, Artificial Sequence
  Description of Artificial Sequence: Synthetic primer
aataatactatt

SEQ ID NO: 1991 - DNA, 11 bp, Artificial Sequence
  Description of Artificial Sequence: Synthetic primer
atctattacta

SEQ ID NO: 1992 - DNA, 10 bp, Artificial Sequence
  Description of Artificial Sequence: Synthetic primer
agtagtatta

SEQ ID NO: 1993 - DNA, 10 bp, Artificial Sequence
  Description of Artificial Sequence: Synthetic primer
gctataatat

SEQ ID NO: 1994 - DNA, 10 bp, Artificial Sequence
  Description of Artificial Sequence: Synthetic primer
tactatatca

SEQ ID NO: 1995 - DNA, 12 bp, Artificial Sequence
  Description of Artificial Sequence: Synthetic primer
ttgataaattat

SEQ ID NO: 1996 - DNA, 12 bp, Artificial Sequence
  Description of Artificial Sequence: Synthetic primer
aaagtaatatta

SEQ ID NO: 1997 - DNA, 12 bp, Artificial Sequence
  Description of Artificial Sequence: Synthetic primer
ttagtaaaaaat

SEQ ID NO: 1998 - DNA, 11 bp, Artificial Sequence
  Description of Artificial Sequence: Synthetic primer
tagttaaagat

SEQ ID NO: 1999 - DNA, 10 bp, Artificial Sequence
  Description of Artificial Sequence: Synthetic primer
caagatattt

SEQ ID NO: 2000 - DNA, 10 bp, Artificial Sequence
  Description of Artificial Sequence: Synthetic primer
tgcattatta

SEQ ID NO: 2001 - DNA, 10 bp, Artificial Sequence
  Description of Artificial Sequence: Synthetic primer
tgaagatwta

SEQ ID NO: 2002 - DNA, 10 bp, Artificial Sequence
  Description of Artificial Sequence: Synthetic primer
attatatagt

SEQ ID NO: 2003 - DNA, 10 bp, Artificial Sequence
  Description of Artificial Sequence: Synthetic primer
agattatata

SEQ ID NO: 2004 - DNA, 9 bp, Artificial Sequence
  Description of Artificial Sequence: Synthetic primer
atacggtat

SEQ ID NO: 2005 - DNA, 11 bp, Artificial Sequence
  Description of Artificial Sequence: Synthetic primer
tattttatcaa

SEQ ID NO: 2006 - DNA, 10 bp, Artificial Sequence
  Description of Artificial Sequence: Synthetic primer
atttactaat

SEQ ID NO: 2007 - DNA, 10 bp, Artificial Sequence
  Description of Artificial Sequence: Synthetic primer
tcttttatag

SEQ ID NO: 2008 - DNA, 11 bp, Artificial Sequence
  Description of Artificial Sequence: Synthetic primer
atagtaaaaaa

SEQ ID NO: 2009 - DNA, 10 bp, Artificial Sequence
  Description of Artificial Sequence: Synthetic primer
gctaaatatt

SEQ ID NO: 2010 - DNA, 10 bp, Artificial Sequence
  Description of Artificial Sequence: Synthetic primer
tataattaac

SEQ ID NO: 2011 - DNA, 11 bp, Artificial Sequence
  Description of Artificial Sequence: Synthetic primer
atttttttgat

SEQ ID NO: 2012 - DNA, 10 bp, Artificial Sequence
  Description of Artificial Sequence: Synthetic primer
tacaagtatt

SEQ ID NO: 2013 - DNA, 10 bp, Artificial Sequence
  Description of Artificial Sequence: Synthetic primer
tcatgattta

SEQ ID NO: 2014 - DNA, 10 bp, Artificial Sequence
  Description of Artificial Sequence: Synthetic primer
attgatttac

SEQ ID NO: 2015 - DNA, 11 bp, Artificial Sequence
  Description of Artificial Sequence: Synthetic primer
taaagaattat

SEQ ID NO: 2016 - DNA, 10 bp, Artificial Sequence
  Description of Artificial Sequence: Synthetic primer
acctttatta

SEQ ID NO: 2017 - DNA, 10 bp, Artificial Sequence
  Description of Artificial Sequence: Synthetic primer
tactatcaaa

SEQ ID NO: 2018 - DNA, 10 bp, Artificial Sequence
  Description of Artificial Sequence: Synthetic primer
caataatatc

SEQ ID NO: 2019 - DNA, 10 bp, Artificial Sequence
  Description of Artificial Sequence: Synthetic primer
ctcttaatat

SEQ ID NO: 2020 - DNA, 10 bp, Artificial Sequence
  Description of Artificial Sequence: Synthetic primer
aaactaccta

SEQ ID NO: 2021 - DNA, 11 bp, Artificial Sequence
  Description of Artificial Sequence: Synthetic primer
atattatgatt

SEQ ID NO: 2022 - DNA, 11 bp, Artificial Sequence
  Description of Artificial Sequence: Synthetic primer
ggtaataaaaa

SEQ ID NO: 2023 - DNA, 11 bp, Artificial Sequence
  Description of Artificial Sequence: Synthetic primer
attctaaatta

SEQ ID NO: 2024 - DNA, 10 bp, Artificial Sequence
  Description of Artificial Sequence: Synthetic primer
tattaaaaat

SEQ ID NO: 2025 - DNA, 10 bp, Artificial Sequence
  Description of Artificial Sequence: Synthetic primer
ttattaattt

SEQ ID NO: 2026 - DNA, 10 bp, Artificial Sequence
  Description of Artificial Sequence: Synthetic primer
ataaaattaa

SEQ ID NO: 2027 - DNA, 10 bp, Artificial Sequence
  Description of Artificial Sequence: Synthetic primer
aaataattat

SEQ ID NO: 2028 - DNA, 10 bp, Artificial Sequence
  Description of Artificial Sequence: Synthetic primer
atataaattt

SEQ ID NO: 2029 - DNA, 10 bp, Artificial Sequence
  Description of Artificial Sequence: Synthetic primer
taaattttct

SEQ ID NO: 2030 - DNA, 10 bp, Artificial Sequence
  Description of Artificial Sequence: Synthetic primer
caataaaaat

SEQ ID NO: 2031 - DNA, 10 bp, Artificial Sequence
  Description of Artificial Sequence: Synthetic primer
ataattataa

SEQ ID NO: 2032 - DNA, 10 bp, Artificial Sequence
  Description of Artificial Sequence: Synthetic primer
taattctttt

SEQ ID NO: 2033 - DNA, 10 bp, Artificial Sequence
  Description of Artificial Sequence: Synthetic primer
aagattttta

SEQ ID NO: 2034 - DNA, 10 bp, Artificial Sequence
  Description of Artificial Sequence: Synthetic primer
aaaaattgat

SEQ ID NO: 2035 - DNA, 8 bp, Artificial Sequence
  Description of Artificial Sequence: Synthetic primer
tgccgata

SEQ ID NO: 2036 - DNA, 10 bp, Artificial Sequence
  Description of Artificial Sequence: Synthetic primer
aagaataata

SEQ ID NO: 2037 - DNA, 10 bp, Artificial Sequence
  Description of Artificial Sequence: Synthetic primer
tgatttaaat

SEQ ID NO: 2038 - DNA, 9 bp, Artificial Sequence
  Description of Artificial Sequence: Synthetic primer
gataatcta

SEQ ID NO: 2039 - DNA, 8 bp, Artificial Sequence
  Description of Artificial Sequence: Synthetic primer
ttgcggta

SEQ ID NO: 2040 - DNA, 11 bp, Artificial Sequence
  Description of Artificial Sequence: Synthetic primer
gcattattact

SEQ ID NO: 2041 - DNA, 12 bp, Artificial Sequence
  Description of Artificial Sequence: Synthetic primer
tttattactaaa

SEQ ID NO: 2042 - DNA, 10 bp, Artificial Sequence
  Description of Artificial Sequence: Synthetic primer
gcttataata

SEQ ID NO: 2043 - DNA, 9 bp, Artificial Sequence
  Description of Artificial Sequence: Synthetic primer
ttaccgcta

SEQ ID NO: 2044 - DNA, 11 bp, Artificial Sequence
  Description of Artificial Sequence: Synthetic primer
atagtattatt

SEQ ID NO: 2045 - DNA, 10 bp, Artificial Sequence
  Description of Artificial Sequence: Synthetic primer
tagtaatatc

SEQ ID NO: 2046 - DNA, 10 bp, Artificial Sequence
  Description of Artificial Sequence: Synthetic primer
gcaagtaata

SEQ ID NO: 2047 - DNA, 11 bp, Artificial Sequence
  Description of Artificial Sequence: Synthetic primer
atattagtaat

SEQ ID NO: 2048 - DNA, 11 bp, Artificial Sequence
  Description of Artificial Sequence: Synthetic primer
wtaaagctaat

SEQ ID NO: 2049 - DNA, 12 bp, Artificial Sequence
  Description of Artificial Sequence: Synthetic primer
tagtatttttaa

SEQ ID NO: 2050 - DNA, 12 bp, Artificial Sequence
  Description of Artificial Sequence: Synthetic primer
atattgataaaa

SEQ ID NO: 2051 - DNA, 12 bp, Artificial Sequence
  Description of Artificial Sequence: Synthetic primer
tatctaaaaaat

SEQ ID NO: 2052 - DNA, 11 bp, Artificial Sequence
  Description of Artificial Sequence: Synthetic primer
tagtattattg

SEQ ID NO: 2053 - DNA, 12 bp, Artificial Sequence
  Description of Artificial Sequence: Synthetic primer
ttgctaaaaata

SEQ ID NO: 2054 - DNA, 12 bp, Artificial Sequence
  Description of Artificial Sequence: Synthetic primer
aataatattgat

SEQ ID NO: 2055 - DNA, 11 bp, Artificial Sequence
  Description of Artificial Sequence: Synthetic primer
taactaaagat

SEQ ID NO: 2056 - DNA, 11 bp, Artificial Sequence
  Description of Artificial Sequence: Synthetic primer
attataggtaa

SEQ ID NO: 2057 - DNA, 10 bp, Artificial Sequence
  Description of Artificial Sequence: Synthetic primer
tactaaatta

SEQ ID NO: 2058 - DNA, 10 bp, Artificial Sequence
  Description of Artificial Sequence: Synthetic primer
taaatctata

SEQ ID NO: 2059 - DNA, 10 bp, Artificial Sequence
  Description of Artificial Sequence: Synthetic primer
atctatatta

SEQ ID NO: 2060 - DNA, 10 bp, Artificial Sequence
  Description of Artificial Sequence: Synthetic primer
tgatatagaa

SEQ ID NO: 2061 - DNA, 10 bp, Artificial Sequence
  Description of Artificial Sequence: Synthetic primer
ataataggta

SEQ ID NO: 2062 - DNA, 10 bp, Artificial Sequence
  Description of Artificial Sequence: Synthetic primer
ctatagtatt

SEQ ID NO: 2063 - DNA, 10 bp, Artificial Sequence
  Description of Artificial Sequence: Synthetic primer
tactaatgct

SEQ ID NO: 2064 - DNA, 10 bp, Artificial Sequence
  Description of Artificial Sequence: Synthetic primer
ttacgtaaat

SEQ ID NO: 2065 - DNA, 11 bp, Artificial Sequence
  Description of Artificial Sequence: Synthetic primer
ataaataagct

SEQ ID NO: 2066 - DNA, 10 bp, Artificial Sequence
  Description of Artificial Sequence: Synthetic primer
acgtaatatt

SEQ ID NO: 2067 - DNA, 10 bp, Artificial Sequence
  Description of Artificial Sequence: Synthetic primer
actattatag

SEQ ID NO: 2068 - DNA, 11 bp, Artificial Sequence
  Description of Artificial Sequence: Synthetic primer
tattagttata

SEQ ID NO: 2069 - DNA, 10 bp, Artificial Sequence
  Description of Artificial Sequence: Synthetic primer
actatagaag

SEQ ID NO: 2070 - DNA, 11 bp, Artificial Sequence
  Description of Artificial Sequence: Synthetic primer
ctttatctatt

SEQ ID NO: 2071 - DNA, 11 bp, Artificial Sequence
  Description of Artificial Sequence: Synthetic primer
aattagcttta

SEQ ID NO: 2072 - DNA, 11 bp, Artificial Sequence
  Description of Artificial Sequence: Synthetic primer
ctattttagta

SEQ ID NO: 2073 - DNA, 11 bp, Artificial Sequence
  Description of Artificial Sequence: Synthetic primer
gataaaatagt

SEQ ID NO: 2074 - DNA, 12 bp, Artificial Sequence
  Description of Artificial Sequence: Synthetic primer
taataaatttga

SEQ ID NO: 2075 - DNA, 11 bp, Artificial Sequence
  Description of Artificial Sequence: Synthetic primer
ttagctaaatt

SEQ ID NO: 2076 - DNA, 11 bp, Artificial Sequence
  Description of Artificial Sequence: Synthetic primer
tattacttgat

SEQ ID NO: 2077 - DNA, 11 bp, Artificial Sequence
  Description of Artificial Sequence: Synthetic primer
tctttagttaa

SEQ ID NO: 2078 - DNA, 10 bp, Artificial Sequence
  Description of Artificial Sequence: Synthetic primer
taataatatt

SEQ ID NO: 2079 - DNA, 10 bp, Artificial Sequence
  Description of Artificial Sequence: Synthetic primer
ttttactata

SEQ ID NO: 2080 - DNA, 10 bp, Artificial Sequence
  Description of Artificial Sequence: Synthetic primer
tttaatagat

SEQ ID NO: 2081 - DNA, 10 bp, Artificial Sequence
  Description of Artificial Sequence: Synthetic primer
atattactat

SEQ ID NO: 2082 - DNA, 10 bp, Artificial Sequence
  Description of Artificial Sequence: Synthetic primer
tattatatct

SEQ ID NO: 2083 - DNA, 10 bp, Artificial Sequence
  Description of Artificial Sequence: Synthetic primer
tatatcatta

SEQ ID NO: 2084 - DNA, 10 bp, Artificial Sequence
  Description of Artificial Sequence: Synthetic primer
atctaatatt

SEQ ID NO: 2085 - DNA, 10 bp, Artificial Sequence
  Description of Artificial Sequence: Synthetic primer
tattattgca

SEQ ID NO: 2086 - DNA, 10 bp, Artificial Sequence
  Description of Artificial Sequence: Synthetic primer
ttaatatatc

SEQ ID NO: 2087 - DNA, 10 bp, Artificial Sequence
  Description of Artificial Sequence: Synthetic primer
tctaatatta

SEQ ID NO: 2088 - DNA, 10 bp, Artificial Sequence
  Description of Artificial Sequence: Synthetic primer
tatcaatata

SEQ ID NO: 2089 - DNA, 10 bp, Artificial Sequence
  Description of Artificial Sequence: Synthetic primer
ttggtaataa

SEQ ID NO: 2090 - DNA, 10 bp, Artificial Sequence
  Description of Artificial Sequence: Synthetic primer
tactaaagaa

SEQ ID NO: 2091 - DNA, 9 bp, Artificial Sequence
  Description of Artificial Sequence: Synthetic primer
tattatcgg

SEQ ID NO: 2092 - DNA, 10 bp, Artificial Sequence
  Description of Artificial Sequence: Synthetic primer
gctataatta

SEQ ID NO: 2093 - DNA, 10 bp, Artificial Sequence
  Description of Artificial Sequence: Synthetic primer
taaagtagta

SEQ ID NO: 2094 - DNA, 10 bp, Artificial Sequence
  Description of Artificial Sequence: Synthetic primer
attaatacca

SEQ ID NO: 2095 - DNA, 10 bp, Artificial Sequence
  Description of Artificial Sequence: Synthetic primer
ttatatagct

SEQ ID NO: 2096 - DNA, 12 bp, Artificial Sequence
  Description of Artificial Sequence: Synthetic primer
taataaattttt

SEQ ID NO: 2097 - DNA, 10 bp, Artificial Sequence
  Description of Artificial Sequence: Synthetic primer
aatttagtag

SEQ ID NO: 2098 - DNA, 10 bp, Artificial Sequence
  Description of Artificial Sequence: Synthetic primer
agctataata

SEQ ID NO: 2099 - DNA, 10 bp, Artificial Sequence
  Description of Artificial Sequence: Synthetic primer
cattactata

SEQ ID NO: 2100 - DNA, 10 bp, Artificial Sequence
  Description of Artificial Sequence: Synthetic primer
gcaataatag

SEQ ID NO: 2101 - DNA, 10 bp, Artificial Sequence
  Description of Artificial Sequence: Synthetic primer
tattataggt

SEQ ID NO: 2102 - DNA, 10 bp, Artificial Sequence
  Description of Artificial Sequence: Synthetic primer
attgaagtag

SEQ ID NO: 2103 - DNA, 10 bp, Artificial Sequence
  Description of Artificial Sequence: Synthetic primer
taatctagat

SEQ ID NO: 2104 - DNA, 10 bp, Artificial Sequence
  Description of Artificial Sequence: Synthetic primer
attactagat

SEQ ID NO: 2105 - DNA, 11 bp, Artificial Sequence
  Description of Artificial Sequence: Synthetic primer
gcaaaagataa

SEQ ID NO: 2106 - DNA, 11 bp, Artificial Sequence
  Description of Artificial Sequence: Synthetic primer
ataaaccttta

SEQ ID NO: 2107 - DNA, 11 bp, Artificial Sequence
  Description of Artificial Sequence: Synthetic primer
ctactatttta

SEQ ID NO: 2108 - DNA, 10 bp, Artificial Sequence
  Description of Artificial Sequence: Synthetic primer
attaatatta

SEQ ID NO: 2109 - DNA, 10 bp, Artificial Sequence
  Description of Artificial Sequence: Synthetic primer
ttttagtatt

SEQ ID NO: 2110 - DNA, 10 bp, Artificial Sequence
  Description of Artificial Sequence: Synthetic primer
aactttaata

SEQ ID NO: 2111 - DNA, 10 bp, Artificial Sequence
  Description of Artificial Sequence: Synthetic primer
taatagtaaa

SEQ ID NO: 2112 - DNA, 10 bp, Artificial Sequence
  Description of Artificial Sequence: Synthetic primer
aattatctat

SEQ ID NO: 2113 - DNA, 10 bp, Artificial Sequence
  Description of Artificial Sequence: Synthetic primer
tattaatact

SEQ ID NO: 2114 - DNA, 10 bp, Artificial Sequence
  Description of Artificial Sequence: Synthetic primer
attattaagt

SEQ ID NO: 2115 - DNA, 10 bp, Artificial Sequence
  Description of Artificial Sequence: Synthetic primer
attaataatc

SEQ ID NO: 2116 - DNA, 9 bp, Artificial Sequence
  Description of Artificial Sequence: Synthetic primer
atcggtaat

SEQ ID NO: 2117 - DNA, 10 bp, Artificial Sequence
  Description of Artificial Sequence: Synthetic primer
aggtataaaa

SEQ ID NO: 2118 - DNA, 10 bp, Artificial Sequence
  Description of Artificial Sequence: Synthetic primer
atacttaata

SEQ ID NO: 2119 - DNA, 10 bp, Artificial Sequence
  Description of Artificial Sequence: Synthetic primer
tttttagcta

SEQ ID NO: 2120 - DNA, 11 bp, Artificial Sequence
  Description of Artificial Sequence: Synthetic primer
ttttagatatt

SEQ ID NO: 2121 - DNA, 10 bp, Artificial Sequence
  Description of Artificial Sequence: Synthetic primer
aatacaagat

SEQ ID NO: 2122 - DNA, 10 bp, Artificial Sequence
  Description of Artificial Sequence: Synthetic primer
atagttttag

SEQ ID NO: 2123 - DNA, 10 bp, Artificial Sequence
  Description of Artificial Sequence: Synthetic primer
aggtaaatta

SEQ ID NO: 2124 - DNA, 10 bp, Artificial Sequence
  Description of Artificial Sequence: Synthetic primer
ataatgctaa

SEQ ID NO: 2125 - DNA, 10 bp, Artificial Sequence
  Description of Artificial Sequence: Synthetic primer
cttttactat

SEQ ID NO: 2126 - DNA, 10 bp, Artificial Sequence
  Description of Artificial Sequence: Synthetic primer
ataagcttta

SEQ ID NO: 2127 - DNA, 11 bp, Artificial Sequence
  Description of Artificial Sequence: Synthetic primer
aattaatagaa

SEQ ID NO: 2128 - DNA, 11 bp, Artificial Sequence
  Description of Artificial Sequence: Synthetic primer
atttagtaaat

SEQ ID NO: 2129 - DNA, 11 bp, Artificial Sequence
  Description of Artificial Sequence: Synthetic primer
gcaataatttt

SEQ ID NO: 2130 - DNA, 10 bp, Artificial Sequence
  Description of Artificial Sequence: Synthetic primer
gtactaaaat

SEQ ID NO: 2131 - DNA, 10 bp, Artificial Sequence
  Description of Artificial Sequence: Synthetic primer
atcattacta

SEQ ID NO: 2132 - DNA, 10 bp, Artificial Sequence
  Description of Artificial Sequence: Synthetic primer
gtaatattga

SEQ ID NO: 2133 - DNA, 10 bp, Artificial Sequence
  Description of Artificial Sequence: Synthetic primer
attctataga

SEQ ID NO: 2134 - DNA, 10 bp, Artificial Sequence
  Description of Artificial Sequence: Synthetic primer
aaactactat

SEQ ID NO: 2135 - DNA, 10 bp, Artificial Sequence
  Description of Artificial Sequence: Synthetic primer
tagtgatata

SEQ ID NO: 2136 - DNA, 10 bp, Artificial Sequence
  Description of Artificial Sequence: Synthetic primer
ataatgacta

SEQ ID NO: 2137 - DNA, 10 bp, Artificial Sequence
  Description of Artificial Sequence: Synthetic primer
tacttaaatc

SEQ ID NO: 2138 - DNA, 10 bp, Artificial Sequence
  Description of Artificial Sequence: Synthetic primer
atagtatcaa

SEQ ID NO: 2139 - DNA, 10 bp, Artificial Sequence
  Description of Artificial Sequence: Synthetic primer
atatttatcg

SEQ ID NO: 2140 - DNA, 10 bp, Artificial Sequence
  Description of Artificial Sequence: Synthetic primer
aatagtagca

SEQ ID NO: 2141 - DNA, 10 bp, Artificial Sequence
  Description of Artificial Sequence: Synthetic primer
tcctactaaa

SEQ ID NO: 2142 - DNA, 10 bp, Artificial Sequence
  Description of Artificial Sequence: Synthetic primer
tagtattaga

SEQ ID NO: 2143 - DNA, 11 bp, Artificial Sequence
  Description of Artificial Sequence: Synthetic primer
gttaattatat

SEQ ID NO: 2144 - DNA, 11 bp, Artificial Sequence
  Description of Artificial Sequence: Synthetic primer
ctataaaatca

SEQ ID NO: 2145 - DNA, 11 bp, Artificial Sequence
  Description of Artificial Sequence: Synthetic primer
tcataatatta

SEQ ID NO: 2146 - DNA, 11 bp, Artificial Sequence
  Description of Artificial Sequence: Synthetic primer
agctttaataa

SEQ ID NO: 2147 - DNA, 12 bp, Artificial Sequence
  Description of Artificial Sequence: Synthetic primer
ttagaaaaatta

SEQ ID NO: 2148 - DNA, 11 bp, Artificial Sequence
  Description of Artificial Sequence: Synthetic primer
ttagtatataa

SEQ ID NO: 2149 - DNA, 11 bp, Artificial Sequence
  Description of Artificial Sequence: Synthetic primer
tttagataaag

SEQ ID NO: 2150 - DNA, 10 bp, Artificial Sequence
  Description of Artificial Sequence: Synthetic primer
aaaatattat

SEQ ID NO: 2151 - DNA, 10 bp, Artificial Sequence
  Description of Artificial Sequence: Synthetic primer
taatttaata

SEQ ID NO: 2152 - DNA, 10 bp, Artificial Sequence
  Description of Artificial Sequence: Synthetic primer
aatttcttta

SEQ ID NO: 2153 - DNA, 10 bp, Artificial Sequence
  Description of Artificial Sequence: Synthetic primer
tttatcttta

SEQ ID NO: 2154 - DNA, 10 bp, Artificial Sequence
  Description of Artificial Sequence: Synthetic primer
tttattactt

SEQ ID NO: 2155 - DNA, 10 bp, Artificial Sequence
  Description of Artificial Sequence: Synthetic primer
ttttattatc

SEQ ID NO: 2156 - DNA, 10 bp, Artificial Sequence
  Description of Artificial Sequence: Synthetic primer
atcaatattt

SEQ ID NO: 2157 - DNA, 10 bp, Artificial Sequence
  Description of Artificial Sequence: Synthetic primer
agtaaaattw

SEQ ID NO: 2158 - DNA, 10 bp, Artificial Sequence
  Description of Artificial Sequence: Synthetic primer
attactttta

SEQ ID NO: 2159 - DNA, 10 bp, Artificial Sequence
  Description of Artificial Sequence: Synthetic primer
tgaatataaa

SEQ ID NO: 2160 - DNA, 10 bp, Artificial Sequence
  Description of Artificial Sequence: Synthetic primer
agcaaatttt

SEQ ID NO: 2161 - DNA, 8 bp, Artificial Sequence
  Description of Artificial Sequence: Synthetic primer
tagtaccg

SEQ ID NO: 2162 - DNA, 10 bp, Artificial Sequence
  Description of Artificial Sequence: Synthetic primer
aaattagtat

SEQ ID NO: 2163 - DNA, 10 bp, Artificial Sequence
  Description of Artificial Sequence: Synthetic primer
atagatttaa

SEQ ID NO: 2164 - DNA, 18 bp, Artificial Sequence
  Description of Artificial Sequence: Synthetic primer
cgtgaagctgcaagaaaa

SEQ ID NO: 2165 - DNA, 23 bp, Artificial Sequence
  Description of Artificial Sequence: Synthetic primer
tggaaaagcaataaaagctgctg

SEQ ID NO: 2166 - DNA, 27 bp, Artificial Sequence
  Description of Artificial Sequence: Synthetic primer
tgttgtatatgaacatttattggaaat

SEQ ID NO: 2167 - DNA, 24 bp, Artificial Sequence
  Description of Artificial Sequence: Synthetic primer
gcttggtaattctgagataagaaa

SEQ ID NO: 2168 - DNA, 23 bp, Artificial Sequence
  Description of Artificial Sequence: Synthetic primer
cctcaatttgaaggtcaaacaaa

SEQ ID NO: 2169 - DNA, 23 bp, Artificial Sequence
  Description of Artificial Sequence: Synthetic primer
attttaaagaggggcttacagct

SEQ ID NO: 2170 - DNA, 21 bp, Artificial Sequence
  Description of Artificial Sequence: Synthetic primer
gccatgaatgaagcttttaaa

SEQ ID NO: 2171 - DNA, 25 bp, Artificial Sequence
  Description of Artificial Sequence: Synthetic primer
ctcatgttatgggatttagaagtgg

SEQ ID NO: 2172 - DNA, 25 bp, Artificial Sequence
  Description of Artificial Sequence: Synthetic primer
ctgacaacattctttcttttgttaa

SEQ ID NO: 2173 - DNA, 21 bp, Artificial Sequence
  Description of Artificial Sequence: Synthetic primer
tgttaatgtggggcttaaatg

SEQ ID NO: 2174 - DNA, 22 bp, Artificial Sequence
  Description of Artificial Sequence: Synthetic primer
gcttttcaatcagaaccttatt

SEQ ID NO: 2175 - DNA, 22 bp, Artificial Sequence
  Description of Artificial Sequence: Synthetic primer
gagggtgggataaaatcttttt

SEQ ID NO: 2176 - DNA, 23 bp, Artificial Sequence
  Description of Artificial Sequence: Synthetic primer
tacccattttagcacttcctcca

SEQ ID NO: 2177 - DNA, 20 bp, Artificial Sequence
  Description of Artificial Sequence: Synthetic primer
tggcaaaatggcctgaaaaa

SEQ ID NO: 2178 - DNA, 25 bp, Artificial Sequence
  Description of Artificial Sequence: Synthetic primer
ttgttttctcaacattaagcatttt

SEQ ID NO: 2179 - DNA, 25 bp, Artificial Sequence
  Description of Artificial Sequence: Synthetic primer
atcattggtgataaccttatcttct

SEQ ID NO: 2180 - DNA, 18 bp, Artificial Sequence
  Description of Artificial Sequence: Synthetic primer
actcctgcaccaagagat

SEQ ID NO: 2181 - DNA, 24 bp, Artificial Sequence
  Description of Artificial Sequence: Synthetic primer
atcttgtgataacgaagttttgta

SEQ ID NO: 2182 - DNA, 20 bp, Artificial Sequence
  Description of Artificial Sequence: Synthetic primer
tccatcaacatcggcatctg

SEQ ID NO: 2183 - DNA, 24 bp, Artificial Sequence
  Description of Artificial Sequence: Synthetic primer
aaaagctaaaagcaaagttctaat

SEQ ID NO: 2184 - DNA, 29 bp, Artificial Sequence
  Description of Artificial Sequence: Synthetic primer
atatatccattttcaattaaatctctcat

SEQ ID NO: 2185 - DNA, 20 bp, Artificial Sequence
  Description of Artificial Sequence: Synthetic primer
tataaagaggaggcatggct

SEQ ID NO: 2186 - DNA, 30 bp, Artificial Sequence
  Description of Artificial Sequence: Synthetic primer
taaaaataataaatacgattgtcatacttt

SEQ ID NO: 2187 - DNA, 26 bp, Artificial Sequence
  Description of Artificial Sequence: Synthetic primer
tattgcgatttttagtttcaatagaa

SEQ ID NO: 2188 - DNA, 23 bp, Artificial Sequence
  Description of Artificial Sequence: Synthetic primer
cccaagccctttatatctctgaa

SEQ ID NO: 2189 - DNA, 24 bp, Artificial Sequence
  Description of Artificial Sequence: Synthetic primer
tggtaaagaaaaatcttcaaaatt

SEQ ID NO: 2190 - DNA, 26 bp, Artificial Sequence
  Description of Artificial Sequence: Synthetic primer
cgataaaatatacatttcaattgaag

SEQ ID NO: 2191 - DNA, 16 bp, Artificial Sequence
  Description of Artificial Sequence: Synthetic primer
ggcttaaagagcttgc

SEQ ID NO: 2192 - DNA, 24 bp, Artificial Sequence
  Description of Artificial Sequence: Synthetic primer
agattataatttcgatgttcttga

SEQ ID NO: 2193 - DNA, 21 bp, Artificial Sequence
  Description of Artificial Sequence: Synthetic primer
cggattctgaaatttttgaaa

SEQ ID NO: 2194 - DNA, 17 bp, Artificial Sequence
  Description of Artificial Sequence: Synthetic primer
ggggactaaggttactt

SEQ ID NO: 2195 - DNA, 21 bp, Artificial Sequence
  Description of Artificial Sequence: Synthetic primer
agaagttgtgggggaatcttc

SEQ ID NO: 2196 - DNA, 15 bp, Artificial Sequence
  Description of Artificial Sequence: Synthetic primer
tgtgggggaatcttc

SEQ ID NO: 2197 - DNA, 20 bp, Artificial Sequence
  Description of Artificial Sequence: Synthetic primer
ctttttcaaaaggtattccg

SEQ ID NO: 2198 - DNA, 23 bp, Artificial Sequence
  Description of Artificial Sequence: Synthetic primer
ggtttatgttaatagagatggaa

SEQ ID NO: 2199 - DNA, 20 bp, Artificial Sequence
  Description of Artificial Sequence: Synthetic primer
ggttgtaaatgctctatctt

SEQ ID NO: 2200 - DNA, 21 bp, Artificial Sequence
  Description of Artificial Sequence: Synthetic primer
tggtaagtttaataaaggcac

SEQ ID NO: 2201 - DNA, 14 bp, Artificial Sequence
  Description of Artificial Sequence: Synthetic primer
agctgcgttggatt

SEQ ID NO: 2202 - DNA, 18 bp, Artificial Sequence
  Description of Artificial Sequence: Synthetic primer
ctagcaggatccatagtt

SEQ ID NO: 2203 - DNA, 24 bp, Artificial Sequence
  Description of Artificial Sequence: Synthetic primer
atcatctatattcatcaatctcat

SEQ ID NO: 2204 - DNA, 22 bp, Artificial Sequence
  Description of Artificial Sequence: Synthetic primer
gagtaacaaaaattttttcagc

SEQ ID NO: 2205 - DNA, 17 bp, Artificial Sequence
  Description of Artificial Sequence: Synthetic primer
tttctgggctcaactaa

SEQ ID NO: 2206 - DNA, 24 bp, Artificial Sequence
  Description of Artificial Sequence: Synthetic primer
gattaattacattaagtgcattct

SEQ ID NO: 2207 - DNA, 17 bp, Artificial Sequence
  Description of Artificial Sequence: Synthetic primer
ccattaacgctccaatt

SEQ ID NO: 2208 - DNA, 27 bp, Artificial Sequence
  Description of Artificial Sequence: Synthetic primer
tcctaacatttaatatttgttctttat

SEQ ID NO: 2209 - DNA, 29 bp, Artificial Sequence
  Description of Artificial Sequence: Synthetic primer
gcataatttaaataagaagtttttatttc

SEQ ID NO: 2210 - DNA, 21 bp, Artificial Sequence
  Description of Artificial Sequence: Synthetic primer
gaagagctctagaaacaataa

SEQ ID NO: 2211 - DNA, 19 bp, Artificial Sequence
  Description of Artificial Sequence: Synthetic primer
tggtttaagaccatctctt

SEQ ID NO: 2212 - DNA, 19 bp, Artificial Sequence
  Description of Artificial Sequence: Synthetic primer
ccgaaaaagatgggctttt

SEQ ID NO: 2213 - DNA, 23 bp, Artificial Sequence
  Description of Artificial Sequence: Synthetic primer
aggttaaaaagtccgaaactatt

SEQ ID NO: 2214 - DNA, 23 bp, Artificial Sequence
  Description of Artificial Sequence: Synthetic primer
tctcccgatcaaattagaaattg

SEQ ID NO: 2215 - DNA, 29 bp, Artificial Sequence
  Description of Artificial Sequence: Synthetic primer
aaagagataaaagattttgaaagaataaa

SEQ ID NO: 2216 - DNA, 22 bp, Artificial Sequence
  Description of Artificial Sequence: Synthetic primer
aaagctaggtttttggagtttt

SEQ ID NO: 2217 - DNA, 26 bp, Artificial Sequence
  Description of Artificial Sequence: Synthetic primer
acagaaaaagaagaagaattgattaa

SEQ ID NO: 2218 - DNA, 21 bp, Artificial Sequence
  Description of Artificial Sequence: Synthetic primer
atgatgctgggaatcaggttc

SEQ ID NO: 2219 - DNA, 18 bp, Artificial Sequence
  Description of Artificial Sequence: Synthetic primer
gggcttggacttgatttg

SEQ ID NO: 2220 - DNA, 24 bp, Artificial Sequence
  Description of Artificial Sequence: Synthetic primer
gtcttttaatgtgctaatgcaaga

SEQ ID NO: 2221 - DNA, 23 bp, Artificial Sequence
  Description of Artificial Sequence: Synthetic primer
gcgttcctactaatgtatcaggg

SEQ ID NO: 2222 - DNA, 28 bp, Artificial Sequence
  Description of Artificial Sequence: Synthetic primer
ggcagagttaaaatatatgaaaatatag

SEQ ID NO: 2223 - DNA, 23 bp, Artificial Sequence
  Description of Artificial Sequence: Synthetic primer
cacccttcaagaacttttaacag

SEQ ID NO: 2224 - DNA, 18 bp, Artificial Sequence
  Description of Artificial Sequence: Synthetic primer
ggctcttgaagcttatgg

SEQ ID NO: 2225 - DNA, 19 bp, Artificial Sequence
  Description of Artificial Sequence: Synthetic primer
agacttggagaaatggagg

SEQ ID NO: 2226 - DNA, 19 bp, Artificial Sequence
  Description of Artificial Sequence: Synthetic primer
gaggaaaggctcaatttgg

SEQ ID NO: 2227 - DNA, 19 bp, Artificial Sequence
  Description of Artificial Sequence: Synthetic primer
tcttgtttctcagcaacct

SEQ ID NO: 2228 - DNA, 16 bp, Artificial Sequence
  Description of Artificial Sequence: Synthetic primer
cgcaagatcaacaggc

SEQ ID NO: 2229 - DNA, 23 bp, Artificial Sequence
  Description of Artificial Sequence: Synthetic primer
actacaccatcttgttgatgata

SEQ ID NO: 2230 - DNA, 21 bp, Artificial Sequence
  Description of Artificial Sequence: Synthetic primer
gtaatggttggggtgatttac

SEQ ID NO: 2231 - DNA, 16 bp, Artificial Sequence
  Description of Artificial Sequence: Synthetic primer
ggagagccgttcgaaa

SEQ ID NO: 2232 - DNA, 29 bp, Artificial Sequence
  Description of Artificial Sequence: Synthetic primer
ccaacttctaaagaaattttatatgatgg

SEQ ID NO: 2233 - DNA, 23 bp, Artificial Sequence
  Description of Artificial Sequence: Synthetic primer
aggaaaaattaaaaactgctgga

SEQ ID NO: 2234 - DNA, 24 bp, Artificial Sequence
  Description of Artificial Sequence: Synthetic primer
tgtttttgaatctgctacaaatga

SEQ ID NO: 2235 - DNA, 28 bp, Artificial Sequence
  Description of Artificial Sequence: Synthetic primer
ctggtaaatatcttggtgaatcttataa

SEQ ID NO: 2236 - DNA, 22 bp, Artificial Sequence
  Description of Artificial Sequence: Synthetic primer
ggacagttaatggaatctcaat

SEQ ID NO: 2237 - DNA, 24 bp, Artificial Sequence
  Description of Artificial Sequence: Synthetic primer
ataccaaatatgagcaactggggc

SEQ ID NO: 2238 - DNA, 20 bp, Artificial Sequence
  Description of Artificial Sequence: Synthetic primer
aagcccaatcctagagggta

SEQ ID NO: 2239 - DNA, 25 bp, Artificial Sequence
  Description of Artificial Sequence: Synthetic primer
tagaattcaaactagatgctgtaat

SEQ ID NO: 2240 - DNA, 27 bp, Artificial Sequence
  Description of Artificial Sequence: Synthetic primer
cggttcaattactacatatttttcata

SEQ ID NO: 2241 - DNA, 19 bp, Artificial Sequence
  Description of Artificial Sequence: Synthetic primer
gcccggttcaattactaca

SEQ ID NO: 2242 - DNA, 24 bp, Artificial Sequence
  Description of Artificial Sequence: Synthetic primer
tcttcatttaaaagctgcattttt

SEQ ID NO: 2243 - DNA, 23 bp, Artificial Sequence
  Description of Artificial Sequence: Synthetic primer
gctctctagcttctatgtactca

SEQ ID NO: 2244 - DNA, 26 bp, Artificial Sequence
  Description of Artificial Sequence: Synthetic primer
aagcattaaaagacataccatatcgc

SEQ ID NO: 2245 - DNA, 24 bp, Artificial Sequence
  Description of Artificial Sequence: Synthetic primer
gaagagttttaatagcctcagccc

SEQ ID NO: 2246 - DNA, 21 bp, Artificial Sequence
  Description of Artificial Sequence: Synthetic primer
gacgaaagctcatcaagatca

SEQ ID NO: 2247 - DNA, 30 bp, Artificial Sequence
  Description of Artificial Sequence: Synthetic primer
cagttttatcatctttatctatcatttgaa

SEQ ID NO: 2248 - DNA, 27 bp, Artificial Sequence
  Description of Artificial Sequence: Synthetic primer
aaattctcaataatttcaagacgtctt

SEQ ID NO: 2249 - DNA, 21 bp, Artificial Sequence
  Description of Artificial Sequence: Synthetic primer
atccactctggcttattgcca

SEQ ID NO: 2250 - DNA, 19 bp, Artificial Sequence
  Description of Artificial Sequence: Synthetic primer
ggggaataacaggaagaac

SEQ ID NO: 2251 - DNA, 15 bp, Artificial Sequence
  Description of Artificial Sequence: Synthetic primer
gctgaaccattggcc

SEQ ID NO: 2252 - DNA, 15 bp, Artificial Sequence
  Description of Artificial Sequence: Synthetic primer
atgttgcaaagcgcc

SEQ ID NO: 2253 - DNA, 35 bp, Artificial Sequence
  Description of Artificial Sequence: Synthetic primer
cgattatttctatttatgactcttctataaagatc

SEQ ID NO: 2254 - DNA, 23 bp, Artificial Sequence
  Description of Artificial Sequence: Synthetic primer
gcattaagaagaagcaactttct

SEQ ID NO: 2255 - DNA, 27 bp, Artificial Sequence
  Description of Artificial Sequence: Synthetic primer
attcttttttcgtttctcacaataatc

SEQ ID NO: 2256 - DNA, 24 bp, Artificial Sequence
  Description of Artificial Sequence: Synthetic primer
gtcaaaaagagagtctactgattc

SEQ ID NO: 2257 - DNA, 24 bp, Artificial Sequence
  Description of Artificial Sequence: Synthetic primer
gaacctttgacaacctttctttta

SEQ ID NO: 2258 - DNA, 15 bp, Artificial Sequence
  Description of Artificial Sequence: Synthetic primer
cgacttgagaggcct

SEQ ID NO: 2259 - DNA, 21 bp, Artificial Sequence
  Description of Artificial Sequence: Synthetic primer
cctgcttaccttttaatgcat

SEQ ID NO: 2260 - DNA, 24 bp, Artificial Sequence
  Description of Artificial Sequence: Synthetic primer
ttttaccaagaagattttgcctaa

SEQ ID NO: 2261 - DNA, 23 bp, Artificial Sequence
  Description of Artificial Sequence: Synthetic primer
caataacagaacgaccagaataa

SEQ ID NO: 2262 - DNA, 24 bp, Artificial Sequence
  Description of Artificial Sequence: Synthetic primer
tctgcttctcaaaatgtaagaaca

SEQ ID NO: 2263 - DNA, 24 bp, Artificial Sequence
  Description of Artificial Sequence: Synthetic primer
taaccaaatgcacatgttatcaaa

SEQ ID NO: 2264 - DNA, 20 bp, Artificial Sequence
  Description of Artificial Sequence: Synthetic primer
ttgctgatcaagctcaatat

SEQ ID NO: 2265 - DNA, 22 bp, Artificial Sequence
  Description of Artificial Sequence: Synthetic primer
gcaacttacagacgaaattaat

SEQ ID NO: 2266 - DNA, 24 bp, Artificial Sequence
  Description of Artificial Sequence: Synthetic primer
agacagaggttctatacaaattga

SEQ ID NO: 2267 - DNA, 21 bp, Artificial Sequence
  Description of Artificial Sequence: Synthetic primer
aggtaacggcacatattcaga

SEQ ID NO: 2268 - DNA, 23 bp, Artificial Sequence
  Description of Artificial Sequence: Synthetic primer
taagaatgaaggaattggcagtt

SEQ ID NO: 2269 - DNA, 29 bp, Artificial Sequence
  Description of Artificial Sequence: Synthetic primer
aatttaaatgaagtagaaaaagtcttagt

SEQ ID NO: 2270 - DNA, 27 bp, Artificial Sequence
  Description of Artificial Sequence: Synthetic primer
ggctattaattttattcagacaacaga

SEQ ID NO: 2271 - DNA, 22 bp, Artificial Sequence
  Description of Artificial Sequence: Synthetic primer
ttgtcacaagcttctagaaata

SEQ ID NO: 2272 - DNA, 25 bp, Artificial Sequence
  Description of Artificial Sequence: Synthetic primer
tttctggtaagattaatgctcaaat

SEQ ID NO: 2273 - DNA, 20 bp, Artificial Sequence
  Description of Artificial Sequence: Synthetic primer
gagcttctgatgatgctgct

SEQ ID NO: 2274 - DNA, 21 bp, Artificial Sequence
  Description of Artificial Sequence: Synthetic primer
gaaaagctttctagtgggtac

SEQ ID NO: 2275 - DNA, 24 bp, Artificial Sequence
  Description of Artificial Sequence: Synthetic primer
cattaacgctgctaatcttagtaa

SEQ ID NO: 2276 - DNA, 23 bp, Artificial Sequence
  Description of Artificial Sequence: Synthetic primer
catcagctattaatgcttcaaga

SEQ ID NO: 2277 - DNA, 28 bp, Artificial Sequence
  Description of Artificial Sequence: Synthetic primer
catggaggaatgatatatgattatcatg

SEQ ID NO: 2278 - DNA, 33 bp, Artificial Sequence
  Description of Artificial Sequence: Synthetic primer
tttttttttaatttttgtgctattctttttaac

SEQ ID NO: 2279 - DNA, 35 bp, Artificial Sequence
  Description of Artificial Sequence: Synthetic primer
taataataattatttttaatgctattgctatttgc

SEQ ID NO: 2280 - DNA, 28 bp, Artificial Sequence
  Description of Artificial Sequence: Synthetic primer
attaaaggcttttgattttaatcaaaga

SEQ ID NO: 2281 - DNA, 21 bp, Artificial Sequence
  Description of Artificial Sequence: Synthetic primer
ttaagcgcatgaaagatcaag

SEQ ID NO: 2282 - DNA, 21 bp, Artificial Sequence
  Description of Artificial Sequence: Synthetic primer
gtggaaggtgaacttaatacc

SEQ ID NO: 2283 - DNA, 30 bp, Artificial Sequence
  Description of Artificial Sequence: Synthetic primer
gattataaaaagaagtacgaagatagagag

SEQ ID NO: 2284 - DNA, 33 bp, Artificial Sequence
  Description of Artificial Sequence: Synthetic primer
ttatttttttgattaaaaattttcaagtcgtaa

SEQ ID NO: 2285 - DNA, 21 bp, Artificial Sequence
  Description of Artificial Sequence: Synthetic primer
gcttccggaggagttatttat

SEQ ID NO: 2286 - DNA, 18 bp, Artificial Sequence
  Description of Artificial Sequence: Synthetic primer
taggagattgtctgtcgc

SEQ ID NO: 2287 - DNA, 22 bp, Artificial Sequence
  Description of Artificial Sequence: Synthetic primer
gcaacattagctgcataaatat

SEQ ID NO: 2288 - DNA, 18 bp, Artificial Sequence
  Description of Artificial Sequence: Synthetic primer
tccctcaccagagaaaag

SEQ ID NO: 2289 - DNA, 19 bp, Artificial Sequence
  Description of Artificial Sequence: Synthetic primer
acaccctcttgaaccggtg

SEQ ID NO: 2290 - DNA, 20 bp, Artificial Sequence
  Description of Artificial Sequence: Synthetic primer
tgagaaggtgctgtagcagg

SEQ ID NO: 2291 - DNA, 27 bp, Artificial Sequence
  Description of Artificial Sequence: Synthetic primer
ttgtaacattaacaggagaattaactc

SEQ ID NO: 2292 - DNA, 24 bp, Artificial Sequence
  Description of Artificial Sequence: Synthetic primer
ttagcaagtgatgtattagcatca

SEQ ID NO: 2293 - DNA, 27 bp, Artificial Sequence
  Description of Artificial Sequence: Synthetic primer
tgatcacttatcattctaatagcattt

SEQ ID NO: 2294 - DNA, 22 bp, Artificial Sequence
  Description of Artificial Sequence: Synthetic primer
ctattttggaaagcacctaaat

SEQ ID NO: 2295 - DNA, 27 bp, Artificial Sequence
  Description of Artificial Sequence: Synthetic primer
gcatactcagtactattctttatagat

SEQ ID NO: 2296 - DNA, 24 bp, Artificial Sequence
  Description of Artificial Sequence: Synthetic primer
tgagcataagatgcttttagattt

SEQ ID NO: 2297 - DNA, 22 bp, Artificial Sequence
  Description of Artificial Sequence: Synthetic primer
tctgtcattgtagcatctttta

SEQ ID NO: 2298 - DNA, 28 bp, Artificial Sequence
  Description of Artificial Sequence: Synthetic primer
ttaaaatactattagttgttgctgctac

SEQ ID NO: 2299 - DNA, 18 bp, Artificial Sequence
  Description of Artificial Sequence: Synthetic primer
attagcctgcgcaatcat

SEQ ID NO: 2300 - DNA, 21 bp, Artificial Sequence
  Description of Artificial Sequence: Synthetic primer
gcaatgacaaaacatattggg

SEQ ID NO: 2301 - DNA, 34 bp, Artificial Sequence
  Description of Artificial Sequence: Synthetic primer
ttaatacaatttataccaattaaactagaatttt

SEQ ID NO: 2302 - DNA, 30 bp, Artificial Sequence
  Description of Artificial Sequence: Synthetic primer
ataaaaaaacaaaagatcctttaaaggatc

SEQ ID NO: 2303 - DNA, 35 bp, Artificial Sequence
  Description of Artificial Sequence: Synthetic primer
ataaattatactaaaattattaaatttttgccgat

SEQ ID NO: 2304 - DNA, 22 bp, Artificial Sequence
  Description of Artificial Sequence: Synthetic primer
gcctgcattatgctttataaca

SEQ ID NO: 2305 - DNA, 19 bp, Artificial Sequence
  Description of Artificial Sequence: Synthetic primer
cctactcaaagcaaactcc

SEQ ID NO: 2306 - DNA, 34 bp, Artificial Sequence
  Description of Artificial Sequence: Synthetic primer
cgaaaatactttataacaatctttaattttaaca

SEQ ID NO: 2307 - DNA, 24 bp, Artificial Sequence
  Description of Artificial Sequence: Synthetic primer
tcgacttatctgctttttgttaac

SEQ ID NO: 2308 - DNA, 23 bp, Artificial Sequence
  Description of Artificial Sequence: Synthetic primer
ctatctttgccatcttcatagtc

SEQ ID NO: 2309 - DNA, 29 bp, Artificial Sequence
  Description of Artificial Sequence: Synthetic primer
gcaataaaaatagaagattctttgtagat

SEQ ID NO: 2310 - DNA, 34 bp, Artificial Sequence
  Description of Artificial Sequence: Synthetic primer
taaaatttcattttcataaacatcaagattaata

SEQ ID NO: 2311 - DNA, 14 bp, Artificial Sequence
  Description of Artificial Sequence: Synthetic primer
gcccgacataccca

SEQ ID NO: 2312 - DNA, 18 bp, Artificial Sequence
  Description of Artificial Sequence: Synthetic primer
cgtgaagctgcaagaaaa

SEQ ID NO: 2313 - DNA, 23 bp, Artificial Sequence
  Description of Artificial Sequence: Synthetic primer
tggaaaagcaataaaagctgctg

SEQ ID NO: 2314 - DNA, 27 bp, Artificial Sequence
  Description of Artificial Sequence: Synthetic primer
tgttgtatatgaacatttattggaaat

SEQ ID NO: 2315 - DNA, 24 bp, Artificial Sequence
  Description of Artificial Sequence: Synthetic primer
gcttggtaattctgagataagaaa

SEQ ID NO: 2316 - DNA, 23 bp, Artificial Sequence
  Description of Artificial Sequence: Synthetic primer
cctcaatttgaaggtcaaacaaa

SEQ ID NO: 2317 - DNA, 23 bp, Artificial Sequence
  Description of Artificial Sequence: Synthetic primer
attttaaagaggggcttacagct

SEQ ID NO: 2318 - DNA, 21 bp, Artificial Sequence
  Description of Artificial Sequence: Synthetic primer
gccatgaatgaagcttttaaa

SEQ ID NO: 2319 - DNA, 25 bp, Artificial Sequence
  Description of Artificial Sequence: Synthetic primer
ctcatgttatgggatttagaagtgg

SEQ ID NO: 2320 - DNA, 25 bp, Artificial Sequence
  Description of Artificial Sequence: Synthetic primer
ctgacaacattctttcttttgttaa

SEQ ID NO: 2321 - DNA, 21 bp, Artificial Sequence
  Description of Artificial Sequence: Synthetic primer
tgttaatgtggggcttaaatg

SEQ ID NO: 2322 - DNA, 22 bp, Artificial Sequence
  Description of Artificial Sequence: Synthetic primer
gcttttcaatcagaaccttatt

SEQ ID NO: 2323 - DNA, 22 bp, Artificial Sequence
  Description of Artificial Sequence: Synthetic primer
gagggtgggataaaatcttttt

SEQ ID NO: 2324 - DNA, 28 bp, Artificial Sequence
  Description of Artificial Sequence: Synthetic primer
tggtaaagaaaaatcttcaaaattttat

SEQ ID NO: 2325 - DNA, 30 bp, Artificial Sequence
  Description of Artificial Sequence: Synthetic primer
cgataaaatatacatttcaattgaagataa

SEQ ID NO: 2326 - DNA, 20 bp, Artificial Sequence
  Description of Artificial Sequence: Synthetic primer
ggcttaaagagcttgctttt

SEQ ID NO: 2327 - DNA, 28 bp, Artificial Sequence
  Description of Artificial Sequence: Synthetic primer
agattataatttcgatgttcttgaaaaa

SEQ ID NO: 2328 - DNA, 25 bp, Artificial Sequence
  Description of Artificial Sequence: Synthetic primer
cggattctgaaatttttgaaacttt

SEQ ID NO: 2329 - DNA, 21 bp, Artificial Sequence
  Description of Artificial Sequence: Synthetic primer
ggggactaaggttactttttt

SEQ ID NO: 2330 - DNA, 25 bp, Artificial Sequence
  Description of Artificial Sequence: Synthetic primer
agaagttgtgggggaatcttctgtt

SEQ ID NO: 2331 - DNA, 24 bp, Artificial Sequence
  Description of Artificial Sequence: Synthetic primer
ctttttcaaaaggtattccgactt

SEQ ID NO: 2332 - DNA, 27 bp, Artificial Sequence
  Description of Artificial Sequence: Synthetic primer
ggtttatgttaatagagatggaaaaat

SEQ ID NO: 2333 - DNA, 24 bp, Artificial Sequence
  Description of Artificial Sequence: Synthetic primer
ggttgtaaatgctctatcttcgtt

SEQ ID NO: 2334 - DNA, 25 bp, Artificial Sequence
  Description of Artificial Sequence: Synthetic primer
tggtaagtttaataaaggcacgtat

SEQ ID NO: 2335 - DNA, 26 bp, Artificial Sequence
  Description of Artificial Sequence: Synthetic primer
ccttgaacttgttttaacaaaattac

SEQ ID NO: 2336 - DNA, 21 bp, Artificial Sequence
  Description of Artificial Sequence: Synthetic primer
accgatattcatgaagaggag

SEQ ID NO: 2337 - DNA, 23 bp, Artificial Sequence
  Description of Artificial Sequence: Synthetic primer
tacccattttagcacttcctcca

SEQ ID NO: 2338 - DNA, 20 bp, Artificial Sequence
  Description of Artificial Sequence: Synthetic primer
tggcaaaatggcctgaaaaa

SEQ ID NO: 2339 - DNA, 25 bp, Artificial Sequence
  Description of Artificial Sequence: Synthetic primer
ttgttttctcaacattaagcatttt

SEQ ID NO: 2340 - DNA, 25 bp, Artificial Sequence
  Description of Artificial Sequence: Synthetic primer
atcattggtgataaccttatcttct

SEQ ID NO: 2341 - DNA, 18 bp, Artificial Sequence
  Description of Artificial Sequence: Synthetic primer
actcctgcaccaagagat

SEQ ID NO: 2342 - DNA, 24 bp, Artificial Sequence
  Description of Artificial Sequence: Synthetic primer
atcttgtgataacgaagttttgta

SEQ ID NO: 2343 - DNA, 20 bp, Artificial Sequence
  Description of Artificial Sequence: Synthetic primer
tccatcaacatcggcatctg

SEQ ID NO: 2344 - DNA, 24 bp, Artificial Sequence
  Description of Artificial Sequence: Synthetic primer
aaaagctaaaagcaaagttctaat

SEQ ID NO: 2345 - DNA, 29 bp, Artificial Sequence
  Description of Artificial Sequence: Synthetic primer
atatatccattttcaattaaatctctcat

SEQ ID NO: 2346 - DNA, 20 bp, Artificial Sequence
  Description of Artificial Sequence: Synthetic primer
tataaagaggaggcatggct

SEQ ID NO: 2347 - DNA, 30 bp, Artificial Sequence; identical to SEQ ID NO: 2186
  Description of Artificial Sequence: Synthetic primer

SEQ ID NO: 2348 - DNA, 26 bp, Artificial Sequence
  Description of Artificial Sequence: Synthetic primer
tattgcgatttttagtttcaatagaa

SEQ ID NO: 2349 - DNA, 23 bp, Artificial Sequence
  Description of Artificial Sequence: Synthetic primer
cccaagccctttatatctctgaa

SEQ ID NO: 2350 - DNA, 18 bp, Artificial Sequence
  Description of Artificial Sequence: Synthetic primer
agctgcgttggattcatc

SEQ ID NO: 2351 - DNA, 22 bp, Artificial Sequence
  Description of Artificial Sequence: Synthetic primer
ctagcaggatccatagttgttt

SEQ ID NO: 2352 - DNA, 28 bp, Artificial Sequence
  Description of Artificial Sequence: Synthetic primer
atcatctatattcatcaatctcattttt

SEQ ID NO: 2353 - DNA, 26 bp, Artificial Sequence
  Description of Artificial Sequence: Synthetic primer
gagtaacaaaaattttttcagcttca

SEQ ID NO: 2354 - DNA, 21 bp, Artificial Sequence
  Description of Artificial Sequence: Synthetic primer
tttctgggctcaactaaatct

SEQ ID NO: 2355 - DNA, 28 bp, Artificial Sequence
  Description of Artificial Sequence: Synthetic primer
gattaattacattaagtgcattctgttc

SEQ ID NO: 2356 - DNA, 21 bp, Artificial Sequence
  Description of Artificial Sequence: Synthetic primer
ccattaacgctccaattacac

SEQ ID NO: 2357 - DNA, 31 bp, Artificial Sequence
  Description of Artificial Sequence: Synthetic primer
tcctaacatttaatatttgttctttattttc

SEQ ID NO: 2358 - DNA, 33 bp, Artificial Sequence
  Description of Artificial Sequence: Synthetic primer
gcataatttaaataagaagtttttatttcatct

SEQ ID NO: 2359 - DNA, 25 bp, Artificial Sequence
  Description of Artificial Sequence: Synthetic primer
gaagagctctagaaacaataactga

SEQ ID NO: 2360 - DNA, 23 bp, Artificial Sequence
  Description of Artificial Sequence: Synthetic primer
tggtttaagaccatctcttacgt

SEQ ID NO: 2361 - DNA, 28 bp, Artificial Sequence
  Description of Artificial Sequence: Synthetic primer
ctcatacatagaataaagtattctcctg

SEQ ID NO: 2362 - DNA, 20 bp, Artificial Sequence
  Description of Artificial Sequence: Synthetic primer
cccacactctctctttcaaa

SEQ ID NO: 2363 - DNA, 23 bp, Artificial Sequence
  Description of Artificial Sequence: Synthetic primer
gatattaaccggcatttaacctt

SEQ ID NO: 2364 - DNA, 26 bp, Artificial Sequence
  Description of Artificial Sequence: Synthetic primer
tctagcttacaatcccatttataaga

SEQ ID NO: 2365 - DNA, 31 bp, Artificial Sequence
  Description of Artificial Sequence: Synthetic primer
ccttcaaattttaattttcctctaaaagtta

SEQ ID NO: 2366 - DNA, 26 bp, Artificial Sequence
  Description of Artificial Sequence: Synthetic primer
ccttcaaaagaagaatcaagatacaa

SEQ ID NO: 2367 - DNA, 20 bp, Artificial Sequence
  Description of Artificial Sequence: Synthetic primer
cacacccccttttgaagata

SEQ ID NO: 2368 - DNA, 27 bp, Artificial Sequence
  Description of Artificial Sequence: Synthetic primer
gtaataaccttactattcttgccaata

SEQ ID NO: 2369 - DNA, 30 bp, Artificial Sequence
  Description of Artificial Sequence: Synthetic primer
ttctactattaatgtatcacaaattaccac

SEQ ID NO: 2370 - DNA, 20 bp, Artificial Sequence
  Description of Artificial Sequence: Synthetic primer
gcatttacattgcccttcaa

SEQ ID NO: 2371 - DNA, 23 bp, Artificial Sequence
  Description of Artificial Sequence: Synthetic primer
caaccgctgtttaaataaacctt

SEQ ID NO: 2372 - DNA, 30 bp, Artificial Sequence
  Description of Artificial Sequence: Synthetic primer
aatattttttttgtttttacatccccatat

SEQ ID NO: 2373 - DNA, 30 bp, Artificial Sequence
  Description of Artificial Sequence: Synthetic primer
cacacttaccatcaaaaattatattatcat

SEQ ID NO: 2374 - DNA, 33 bp, Artificial Sequence
  Description of Artificial Sequence: Synthetic primer
aagaaaataaatctacaatttcattagacttta

SEQ ID NO: 2375 - DNA, 26 bp, Artificial Sequence
  Description of Artificial Sequence: Synthetic primer
caaagtatcttttatttgtgaaacgg

SEQ ID NO: 2376 - DNA, 34 bp, Artificial Sequence
  Description of Artificial Sequence: Synthetic primer
tctacttattattaattaataaaaaacactgacc

SEQ ID NO: 2377 - DNA, 33 bp, Artificial Sequence
  Description of Artificial Sequence: Synthetic primer
ctctacgaattaaatttttaagaaaggatttta

SEQ ID NO: 2378 - DNA, 26 bp, Artificial Sequence
  Description of Artificial Sequence: Synthetic primer
atcaaatccaccattttttttatcca

SEQ ID NO: 2379 - DNA, 18 bp, Artificial Sequence
  Description of Artificial Sequence: Synthetic primer
ccaaccgccttatttcac

SEQ ID NO: 2380 - DNA, 33 bp, Artificial Sequence
  Description of Artificial Sequence: Synthetic primer
ttttcaaattatcttcaatcttaaactctttag

SEQ ID NO: 2381 - DNA, 25 bp, Artificial Sequence
  Description of Artificial Sequence: Synthetic primer
ttttagcaacaactttaaccacttt

SEQ ID NO: 2382 - DNA, 17 bp, Artificial Sequence
  Description of Artificial Sequence: Synthetic primer
tgtcacgctagatgcag

SEQ ID NO: 2383 - DNA, 21 bp, Artificial Sequence
  Description of Artificial Sequence: Synthetic primer
ctttacgccacttaaatctgc

SEQ ID NO: 2384 - DNA, 24 bp, Artificial Sequence
  Description of Artificial Sequence: Synthetic primer
aatcagaaaatattaccccgtttg

SEQ ID NO: 2385 - DNA, 31 bp, Artificial Sequence
  Description of Artificial Sequence: Synthetic primer
atattattttctaaacctgaagaaggaatat

SEQ ID NO: 2386 - DNA, 31 bp, Artificial Sequence
  Description of Artificial Sequence: Synthetic primer
cattaaaaaatttgatgatattactttgctc

SEQ ID NO: 2387 - DNA, 27 bp, Artificial Sequence
  Description of Artificial Sequence: Synthetic primer
gttttgctgttaaagtaaggaaattag

SEQ ID NO: 2388 - DNA, 22 bp, Artificial Sequence
  Description of Artificial Sequence: Synthetic primer
gctgctagaaaaaaatctcgtt

SEQ ID NO: 2389 - DNA, 25 bp, Artificial Sequence
  Description of Artificial Sequence: Synthetic primer
ctgctagaaagcgaataattcataa

SEQ ID NO: 2390 - DNA, 31 bp, Artificial Sequence
  Description of Artificial Sequence: Synthetic primer
gaattttttaaatttgttgcaaaaaaactag

SEQ ID NO: 2391 - DNA, 18 bp, Artificial Sequence
  Description of Artificial Sequence: Synthetic primer
gcgggtaagaaagacgaa

SEQ ID NO: 2392 - DNA, 22 bp, Artificial Sequence
  Description of Artificial Sequence: Synthetic primer
gaaaaacgctgtatcaacatga

SEQ ID NO: 2393 - DNA, 33 bp, Artificial Sequence
  Description of Artificial Sequence: Synthetic primer
attagaaatgtaagtgtaaaaagtgaattaaaa

SEQ ID NO: 2394 - DNA, 23 bp, Artificial Sequence
  Description of Artificial Sequence: Synthetic primer
cgctctcgtcaaaatttaaaaag

SEQ ID NO: 2395 - DNA, 21 bp, Artificial Sequence
  Description of Artificial Sequence: Synthetic primer
cttgagaaaaaatgcatctgc

SEQ ID NO: 2396 - DNA, 38 bp, Artificial Sequence
  Description of Artificial Sequence: Synthetic primer
gatatattaaagctattgtttaataatattattaagga

SEQ ID NO: 2397 - DNA, 34 bp, Artificial Sequence
  Description of Artificial Sequence: Synthetic primer
attaacttaaatctttgattgactatatttgaat

SEQ ID NO: 2398 - DNA, 32 bp, Artificial Sequence
  Description of Artificial Sequence: Synthetic primer
aggtttttgaatatattaatcaaaactattgt

SEQ ID NO: 2399 - DNA, 31 bp, Artificial Sequence
  Description of Artificial Sequence: Synthetic primer
attttgaataaaaaaatttcttattccatgc

SEQ ID NO: 2400 - DNA, 26 bp, Artificial Sequence
  Description of Artificial Sequence: Synthetic primer
caaagaaaatcatcagacaaaaaagg

SEQ ID NO: 2401 - DNA, 35 bp, Artificial Sequence
  Description of Artificial Sequence: Synthetic primer
gaatttgaatttaacaataaaaattatttatgctt

SEQ ID NO: 2402 - DNA, 29 bp, Artificial Sequence
  Description of Artificial Sequence: Synthetic primer
gaattttttgaaaaaatttttattgccag

SEQ ID NO: 2403 - DNA, 30 bp, Artificial Sequence
  Description of Artificial Sequence: Synthetic primer
ctgtgaaagaaaaatttttaaaagtgaaat

SEQ ID NO: 2404 - DNA, 32 bp, Artificial Sequence
  Description of Artificial Sequence: Synthetic primer
caatatagtgttattttatgagtttaggaaag

SEQ ID NO: 2405 - DNA, 21 bp, Artificial Sequence
  Description of Artificial Sequence: Synthetic primer
ttttgttgggggatttttcag

SEQ ID NO: 2406 - DNA, 21 bp, Artificial Sequence
  Description of Artificial Sequence: Synthetic primer
ttttgttgggggatttttcag

SEQ ID NO: 2407 - DNA, 42 bp, Artificial Sequence
  Description of Artificial Sequence: Synthetic primer
gcaatatatttatttttttatttatttgttttattgatatta

SEQ ID NO: 2408 - DNA, 34 bp, Artificial Sequence
  Description of Artificial Sequence: Synthetic primer
gtattatgattgctttatttgtttattacatttc

SEQ ID NO: 2409 - DNA, 36 bp, Artificial Sequence
  Description of Artificial Sequence: Synthetic primer
gatattatttatcttgtacttatctttttatgtttt

SEQ ID NO: 2410 - DNA, 23 bp, Artificial Sequence
  Description of Artificial Sequence: Synthetic primer
gtcccaaaattggaaaattttcc

SEQ ID NO: 2411 - DNA, 33 bp, Artificial Sequence
  Description of Artificial Sequence: Synthetic primer
tatttaaagagcttaaaattaagagaaaagatc

SEQ ID NO: 2412 - DNA, 18 bp, Artificial Sequence
  Description of Artificial Sequence: Synthetic primer
cctatccttctgccaacg

SEQ ID NO: 2413 - DNA, 28 bp, Artificial Sequence
  Description of Artificial Sequence: Synthetic primer
ggaaaaaagattgtatatacttgacatg

SEQ ID NO: 2414 - DNA, 26 bp, Artificial Sequence
  Description of Artificial Sequence: Synthetic primer
caaagtagaagaagatccaagtattc

SEQ ID NO: 2415 - DNA, 24 bp, Artificial Sequence
  Description of Artificial Sequence: Synthetic primer
ggcaagaattttgggataataaca

SEQ ID NO: 2416 - DNA, 30 bp, Artificial Sequence
  Description of Artificial Sequence: Synthetic primer
tgtctaaatacgaattcataaaaattgaaa

SEQ ID NO: 2417 - DNA, 30 bp, Artificial Sequence
  Description of Artificial Sequence: Synthetic primer
gaataagttgttatgagttaattttcaaga

SEQ ID NO: 2418 - DNA, 34 bp, Artificial Sequence
  Description of Artificial Sequence: Synthetic primer
taaataaaattaacaaaaatgcaatctaaaagaa

SEQ ID NO: 2419 - DNA, 21 bp, Artificial Sequence
  Description of Artificial Sequence: Synthetic primer
cacagcatcaaaattgttagc

SEQ ID NO: 2420 - DNA, 15 bp, Artificial Sequence
  Description of Artificial Sequence: Synthetic primer
ccgtgctggttcaag

SEQ ID NO: 2421 - DNA, 14 bp, Artificial Sequence
  Description of Artificial Sequence: Synthetic primer
gaggggctagtggg

SEQ ID NO: 2422 - DNA, 17 bp, Artificial Sequence
  Description of Artificial Sequence: Synthetic primer
ggaagtggtagacacgc

SEQ ID NO: 2423 - DNA, 28 bp, Artificial Sequence
  Description of Artificial Sequence: Synthetic primer
aaaaaatataatggttaatagtgctgtg

SEQ ID NO: 2424 - DNA, 34 bp, Artificial Sequence
  Description of Artificial Sequence: Synthetic primer
gtaattaaaaaaaataaaaaagttgacaaaaatt

SEQ ID NO: 2425 - DNA, 25 bp, Artificial Sequence
  Description of Artificial Sequence: Synthetic primer
cgctgtaatagcaacaacaataata

SEQ ID NO: 2426 - DNA, 38 bp, Artificial Sequence
  Description of Artificial Sequence: Synthetic primer
aataatattttcaaaaataaaaataattatatttgcaa

SEQ ID NO: 2427 - DNA, 22 bp, Artificial Sequence
  Description of Artificial Sequence: Synthetic primer
ctctaagcttcaaactaggtca

SEQ ID NO: 2428 - DNA, 23 bp, Artificial Sequence
  Description of Artificial Sequence: Synthetic primer
aactttgctctcaatagttgttt

SEQ ID NO: 2429 - DNA, 32 bp, Artificial Sequence
  Description of Artificial Sequence: Synthetic primer
tatgaaatctaatctatttattgtttctgact

SEQ ID NO: 2430 - DNA, 22 bp, Artificial Sequence
  Description of Artificial Sequence: Synthetic primer
gcaatatttatgtcagcaggaa

SEQ ID NO: 2431 - DNA, 21 bp, Artificial Sequence
  Description of Artificial Sequence: Synthetic primer
gaaggtttataccctttggag

SEQ ID NO: 2432 - DNA, 26 bp, Artificial Sequence
  Description of Artificial Sequence: Synthetic primer
tggtcaatatggggtattaactttat

SEQ ID NO: 2433 - DNA, 27 bp, Artificial Sequence
  Description of Artificial Sequence: Synthetic primer
caataacctgcttgacaaaataaatta

SEQ ID NO: 2434 - DNA, 33 bp, Artificial Sequence
  Description of Artificial Sequence: Synthetic primer
ggaaattaatgggaaataaattatttaaaaaca

SEQ ID NO: 2435 - DNA, 28 bp, Artificial Sequence
  Description of Artificial Sequence: Synthetic primer
agacataatatctttttacattgggaaa

SEQ ID NO: 2436 - DNA, 21 bp, Artificial Sequence
  Description of Artificial Sequence: Synthetic primer
tttaggaattttttggggagc

SEQ ID NO: 2437 - DNA, 17 bp, Artificial Sequence
  Description of Artificial Sequence: Synthetic primer
tgagggtgagttcctgt

SEQ ID NO: 2438 - DNA, 35 bp, Artificial Sequence
  Description of Artificial Sequence: Synthetic primer
ttgttttttaaacttattaatattttcttctgtac

SEQ ID NO: 2439 - DNA, 15 bp, Artificial Sequence
  Description of Artificial Sequence: Synthetic primer
ggcaaaccccaaagc

SEQ ID NO: 2440 - DNA, 21 bp, Artificial Sequence
  Description of Artificial Sequence: Synthetic primer
gtgttctaatttctcgatccc

SEQ ID NO: 2441 - DNA, 25 bp, Artificial Sequence
  Description of Artificial Sequence: Synthetic primer
actgtgtccatttatagtaattctc

SEQ ID NO: 2442 - DNA, 26 bp, Artificial Sequence
  Description of Artificial Sequence: Synthetic primer
ctagcccttttttatataattgcagg

SEQ ID NO: 2443 - DNA, 23 bp, Artificial Sequence
  Description of Artificial Sequence: Synthetic primer
gtaccatacaggcatttctttta

SEQ ID NO: 2444 - DNA, 18 bp, Artificial Sequence
  Description of Artificial Sequence: Synthetic primer
ctagtaccgttccaagct

SEQ ID NO: 2445 - DNA, 25 bp, Artificial Sequence
  Description of Artificial Sequence: Synthetic primer
gtccatctgaagtttgaataatctc

SEQ ID NO: 2446 - DNA, 18 bp, Artificial Sequence
  Description of Artificial Sequence: Synthetic primer
acgctgtaagatcctctc

SEQ ID NO: 2447 - DNA, 29 bp, Artificial Sequence
  Description of Artificial Sequence: Synthetic primer
gtaatttttaaaacccactgtcttaaata

SEQ ID NO: 2448 - DNA, 19 bp, Artificial Sequence
  Description of Artificial Sequence: Synthetic primer
cgtctagcaatctttcagc

SEQ ID NO: 2449 - DNA, 22 bp, Artificial Sequence
  Description of Artificial Sequence: Synthetic primer
agattcaggccattctaattct

SEQ ID NO: 2450 - DNA, 19 bp, Artificial Sequence
  Description of Artificial Sequence: Synthetic primer
tccaatttcgctgcatttc

SEQ ID NO: 2451 - DNA, 24 bp, Artificial Sequence
  Description of Artificial Sequence: Synthetic primer
aattcaatttcaactcctgttgat

SEQ ID NO: 2452 - DNA, 18 bp, Artificial Sequence
  Description of Artificial Sequence: Synthetic primer
ttttatcgctgtggcctt

SEQ ID NO: 2453 - DNA, 19 bp, Artificial Sequence
  Description of Artificial Sequence: Synthetic primer
ctttacaacaaggccagac

SEQ ID NO: 2454 - DNA, 22 bp, Artificial Sequence
  Description of Artificial Sequence: Synthetic primer
cgatcactaaatatgtgatgcc

SEQ ID NO: 2455 - DNA, 33 bp, Artificial Sequence
  Description of Artificial Sequence: Synthetic primer
gttgttctttgttattttttctattagtttatt

SEQ ID NO: 2456 - DNA, 28 bp, Artificial Sequence
  Description of Artificial Sequence: Synthetic primer
cttcgtgctttacatattttaaaacatt

SEQ ID NO: 2457 - DNA, 22 bp, Artificial Sequence
  Description of Artificial Sequence: Synthetic primer
gagaagtcctattaagatcgct

SEQ ID NO: 2458 - DNA, 22 bp, Artificial Sequence
  Description of Artificial Sequence: Synthetic primer
ctgtgaaaactcccgatttatc

SEQ ID NO: 2459 - DNA, 23 bp, Artificial Sequence
  Description of Artificial Sequence: Synthetic primer
catttgttattggatgaaatgcg

SEQ ID NO: 2460 - DNA, 17 bp, Artificial Sequence
  Description of Artificial Sequence: Synthetic primer
gcttccaacccaaattg

SEQ ID NO: 2461 - DNA, 17 bp, Artificial Sequence
  Description of Artificial Sequence: Synthetic primer
cggttccgtaagttcct

SEQ ID NO: 2462 - DNA, 21 bp, Artificial Sequence
  Description of Artificial Sequence: Synthetic primer
gtgttgctatgaatcctgttg

SEQ ID NO: 2463 - DNA, 17 bp, Artificial Sequence
  Description of Artificial Sequence: Synthetic primer
ggtagaagacccaaggt

SEQ ID NO: 2464 - DNA, 20 bp, Artificial Sequence
  Description of Artificial Sequence: Synthetic primer
ggaaagctggtaaaagtagg

SEQ ID NO: 2465 - DNA, 26 bp, Artificial Sequence
  Description of Artificial Sequence: Synthetic primer
tggaaatgaagattatgccaatattt

SEQ ID NO: 2466 - DNA, 28 bp, Artificial Sequence
  Description of Artificial Sequence: Synthetic primer
tttttaaaaaatgtattgcaacaattgg

SEQ ID NO: 2467 - DNA, 20 bp, Artificial Sequence
  Description of Artificial Sequence: Synthetic primer
ttatcatctggcgagatgag

SEQ ID NO: 2468 - DNA, 19 bp, Artificial Sequence
  Description of Artificial Sequence: Synthetic primer
gacgggaattatgtcactg

SEQ ID NO: 2469 - DNA, 22 bp, Artificial Sequence
  Description of Artificial Sequence: Synthetic primer
ggtggatatgctatgatacttg

SEQ ID NO: 2470 - DNA, 19 bp, Artificial Sequence
  Description of Artificial Sequence: Synthetic primer
gggtggacagcttataaga

SEQ ID NO: 2471 - DNA, 24 bp, Artificial Sequence
  Description of Artificial Sequence: Synthetic primer
cgttcacaatattgagcttaatgt

SEQ ID NO: 2472 - DNA, 27 bp, Artificial Sequence
  Description of Artificial Sequence: Synthetic primer
cttacctcttgaaaatattcctattgg

SEQ ID NO: 2473 - DNA, 23 bp, Artificial Sequence
  Description of Artificial Sequence: Synthetic primer
ctaatgctccaattaaaattggc

SEQ ID NO: 2474 - DNA, 21 bp, Artificial Sequence
  Description of Artificial Sequence: Synthetic primer
ggttggagatgttttggaaag

SEQ ID NO: 2475 - DNA, 26 bp, Artificial Sequence
  Description of Artificial Sequence: Synthetic primer
aaaggtatattatttctcctaaaggc

SEQ ID NO: 2476 - DNA, 28 bp, Artificial Sequence
  Description of Artificial Sequence: Synthetic primer
gctaatatagctttgcttgtttataaag

SEQ ID NO: 2477 - DNA, 26 bp, Artificial Sequence
  Description of Artificial Sequence: Synthetic primer
gttgcttctattgaatatgatcctaa

SEQ ID NO: 2478 - DNA, 25 bp, Artificial Sequence
  Description of Artificial Sequence: Synthetic primer
cgaagagataaatttagcattcctg

SEQ ID NO: 2479 - DNA, 26 bp, Artificial Sequence
  Description of Artificial Sequence: Synthetic primer
gcataagagaaagtataggttgattg

SEQ ID NO: 2480 - DNA, 27 bp, Artificial Sequence
  Description of Artificial Sequence: Synthetic primer
ctggtaggattagtattagaagaagag

SEQ ID NO: 2481 - DNA, 25 bp, Artificial Sequence
  Description of Artificial Sequence: Synthetic primer
aaaaggtaaaaaatttaaatcgggc

SEQ ID NO: 2482 - DNA, 24 bp, Artificial Sequence
  Description of Artificial Sequence: Synthetic primer
caaaggtaatgatcctttgaaatc

SEQ ID NO: 2483 - DNA, 26 bp, Artificial Sequence
  Description of Artificial Sequence: Synthetic primer
gctataagacgactttatcttttgat

SEQ ID NO: 2484 - DNA, 25 bp, Artificial Sequence
  Description of Artificial Sequence: Synthetic primer
agacttataagccaaaaacttcttc

SEQ ID NO: 2485 - DNA, 25 bp, Artificial Sequence
  Description of Artificial Sequence: Synthetic primer
ggttttggagaaaaataaatatggg

SEQ ID NO: 2486 - DNA, 33 bp, Artificial Sequence
  Description of Artificial Sequence: Synthetic primer
caaaaaggaagataaaatagatattttttagtg

SEQ ID NO: 2487 - DNA, 22 bp, Artificial Sequence
  Description of Artificial Sequence: Synthetic primer
tttcttgcgagtcttataacct

SEQ ID NO: 2488 - DNA, 38 bp, Artificial Sequence
  Description of Artificial Sequence: Synthetic primer
tttatttcttcttttaataataaatttatctgaatatc

SEQ ID NO: 2489 - DNA, 28 bp, Artificial Sequence
  Description of Artificial Sequence: Synthetic primer
ttttttaatagatcttgccactatactc

SEQ ID NO: 2490 - DNA, 31 bp, Artificial Sequence
  Description of Artificial Sequence: Synthetic primer
actttttgataaagactcttttctataaaag

SEQ ID NO: 2491 - DNA, 20 bp, Artificial Sequence
  Description of Artificial Sequence: Synthetic primer
cttctcacttccaaaagacg

SEQ ID NO: 2492 - DNA, 25 bp, Artificial Sequence
  Description of Artificial Sequence: Synthetic primer
aagatctggagtaggttttaataac

SEQ ID NO: 2493 - DNA, 22 bp, Artificial Sequence
  Description of Artificial Sequence: Synthetic primer
ggcttaccatttcaggaattat

SEQ ID NO: 2494 - DNA, 25 bp, Artificial Sequence
  Description of Artificial Sequence: Synthetic primer
aagttttgccattgtaaacagatat

SEQ ID NO: 2495 - DNA, 26 bp, Artificial Sequence
  Description of Artificial Sequence: Synthetic primer
caagatcctcggtaatataaataggt

SEQ ID NO: 2496 - DNA, 17 bp, Artificial Sequence
  Description of Artificial Sequence: Synthetic primer
ctcgccaagcttatgtc

SEQ ID NO: 2497 - DNA, 22 bp, Artificial Sequence
  Description of Artificial Sequence: Synthetic primer
cctctaaaaatccttgtaggtg

SEQ ID NO: 2498 - DNA, 22 bp, Artificial Sequence
  Description of Artificial Sequence: Synthetic primer
cctctaaaaatccttgtaggtg

SEQ ID NO: 2499 - DNA, 23 bp, Artificial Sequence
  Description of Artificial Sequence: Synthetic primer
cttccctttttatctgacttagc

SEQ ID NO: 2500 - DNA, 29 bp, Artificial Sequence
  Description of Artificial Sequence: Synthetic primer
atcttctatttaccaacataactacttac

SEQ ID NO: 2501 - DNA, 21 bp, Artificial Sequence
  Description of Artificial Sequence: Synthetic primer
agggtaaatttttgccctttg

SEQ ID NO: 2502 - DNA, 22 bp, Artificial Sequence
  Description of Artificial Sequence: Synthetic primer
ctattggcctaactttttttgg

SEQ ID NO: 2503 - DNA, 18 bp, Artificial Sequence
  Description of Artificial Sequence: Synthetic primer
agactctccccggatatt

SEQ ID NO: 2504 - DNA, 17 bp, Artificial Sequence
  Description of Artificial Sequence: Synthetic primer
aaagcactgcaatagcc

SEQ ID NO: 2505 - DNA, 24 bp, Artificial Sequence
  Description of Artificial Sequence: Synthetic primer
taaaagcttagctcctttattagg

SEQ ID NO: 2506 - DNA, 20 bp, Artificial Sequence
  Description of Artificial Sequence: Synthetic primer
tgatgctgctgacttaacaa

SEQ ID NO: 2507 - DNA, 26 bp, Artificial Sequence
  Description of Artificial Sequence: Synthetic primer
ctcggaaagatttttattgtgataca

SEQ ID NO: 2508 - DNA, 29 bp, Artificial Sequence
  Description of Artificial Sequence: Synthetic primer
catcaaccataactgttttaacaaatatc

SEQ ID NO: 2509 - DNA, 21 bp, Artificial Sequence
  Description of Artificial Sequence: Synthetic primer
gccaaatctttttacgacgac

SEQ ID NO: 2510 - DNA, 19 bp, Artificial Sequence
  Description of Artificial Sequence: Synthetic primer
tatcagctctacccctagc

SEQ ID NO: 2511 - DNA, 31 bp, Artificial Sequence
  Description of Artificial Sequence: Synthetic primer
cttcaacaaaaatatgacaatttctattaac

SEQ ID NO: 2512 - DNA, 31 bp, Artificial Sequence
  Description of Artificial Sequence: Synthetic primer
ttaatgaaaaagaatacattaagtgcaatat

SEQ ID NO: 2513 - DNA, 29 bp, Artificial Sequence
  Description of Artificial Sequence: Synthetic primer
ctaataattcataaataaaaaggaggcac

SEQ ID NO: 2514 - DNA, 32 bp, Artificial Sequence
  Description of Artificial Sequence: Synthetic primer
ttttcaaataaaaaattgaaaaacaaaattgt

SEQ ID NO: 2515 - DNA, 34 bp, Artificial Sequence
  Description of Artificial Sequence: Synthetic primer
aatatttattcaagatattgaagaatttgaaaaa

SEQ ID NO: 2516 - DNA, 35 bp, Artificial Sequence
  Description of Artificial Sequence: Synthetic primer
tttaaaatcaaattaagacaatatttttcaaattc

SEQ ID NO: 2517 - DNA, 22 bp, Artificial Sequence
  Description of Artificial Sequence: Synthetic primer
agcatatttggctttgcttatg

SEQ ID NO: 2518 - DNA, 38 bp, Artificial Sequence
  Description of Artificial Sequence: Synthetic primer
aaattaaaactttttttattaaagtatacttcatttaa

SEQ ID NO: 2519 - DNA, 25 bp, Artificial Sequence
  Description of Artificial Sequence: Synthetic primer
gcctgagtattcattatataagtcc

SEQ ID NO: 2520 - DNA, 28 bp, Artificial Sequence
  Description of Artificial Sequence: Synthetic primer
tatattgggatccaaaatctaatacaag

SEQ ID NO: 2521 - DNA, 28 bp, Artificial Sequence
  Description of Artificial Sequence: Synthetic primer
caatttctctaattcttcttgcaattag

SEQ ID NO: 2522 - DNA, 31 bp, Artificial Sequence
  Description of Artificial Sequence: Synthetic primer
ggagtatagtaaggtattacttttgtataaa

SEQ ID NO: 2523 - DNA, 32 bp, Artificial Sequence
  Description of Artificial Sequence: Synthetic primer
ttcctgagatattcatatttttaatttctttt

SEQ ID NO: 2524 - DNA, 19 bp, Artificial Sequence
  Description of Artificial Sequence: Synthetic primer
gcaggacttccacttagta

SEQ ID NO: 2525 - DNA, 24 bp, Artificial Sequence
  Description of Artificial Sequence: Synthetic primer
ggtaggagcttcttttgaataaac

SEQ ID NO: 2526 - DNA, 34 bp, Artificial Sequence
  Description of Artificial Sequence: Synthetic primer
caaaataggtattttcaaattaaaaatttccata

SEQ ID NO: 2527 - DNA, 31 bp, Artificial Sequence
  Description of Artificial Sequence: Synthetic primer
aatttaacaattatttgcattccataacata

SEQ ID NO: 2528 - DNA, 24 bp, Artificial Sequence
  Description of Artificial Sequence: Synthetic primer
gcttagagtctttagatactaggc

SEQ ID NO: 2529 - DNA, 22 bp, Artificial Sequence
  Description of Artificial Sequence: Synthetic primer
aaagatttcagagctcccatat

SEQ ID NO: 2530 - DNA, 29 bp, Artificial Sequence
  Description of Artificial Sequence: Synthetic primer
ttctgaaaataaaagagatttttcatctc

SEQ ID NO: 2531 - DNA, 28 bp, Artificial Sequence
  Description of Artificial Sequence: Synthetic primer
tgactcatgataatttgaaatttgtttg

SEQ ID NO: 2532 - DNA, 29 bp, Artificial Sequence
  Description of Artificial Sequence: Synthetic primer
aaattatcaggaattttttcaatactgtc

SEQ ID NO: 2533 - DNA, 29 bp, Artificial Sequence
  Description of Artificial Sequence: Synthetic primer
gcaatacaattttttgtaaaagctaattg

SEQ ID NO: 2534 - DNA, 27 bp, Artificial Sequence
  Description of Artificial Sequence: Synthetic primer
ccgtaaattttttgagtttcatttgat

SEQ ID NO: 2535 - DNA, 22 bp, Artificial Sequence
  Description of Artificial Sequence: Synthetic primer
agttacttctggatggaattgt

SEQ ID NO: 2536 - DNA, 30 bp, Artificial Sequence
  Description of Artificial Sequence: Synthetic primer
aatttttaattatttgatcaccaaattcag

SEQ ID NO: 2537 - DNA, 20 bp, Artificial Sequence
  Description of Artificial Sequence: Synthetic primer
accgcattagaatccgtaat

SEQ ID NO: 2538 - DNA, 19 bp, Artificial Sequence
  Description of Artificial Sequence: Synthetic primer
acctctttcacagcaagtt

SEQ ID NO: 2539 - DNA, 21 bp, Artificial Sequence
  Description of Artificial Sequence: Synthetic primer
catctatagatgacagcaacg

SEQ ID NO: 2540 - DNA, 21 bp, Artificial Sequence
  Description of Artificial Sequence: Synthetic primer
ttaccaatagctttagcagca

SEQ ID NO: 2541 - DNA, 25 bp, Artificial Sequence
  Description of Artificial Sequence: Synthetic primer
gtatccaaaccattattttggtgta

SEQ ID NO: 2542 - DNA, 25 bp, Artificial Sequence
  Description of Artificial Sequence: Synthetic primer
gctaacaatgatccattgtgattat

SEQ ID NO: 2543 - DNA, 24 bp, Artificial Sequence
  Description of Artificial Sequence: Synthetic primer
tattagggttgatattgcataagc

SEQ ID NO: 2544 - DNA, 28 bp, Artificial Sequence
  Description of Artificial Sequence: Synthetic primer
cttcatttttcaatccatctaatttttg

SEQ ID NO: 2545 - DNA, 21 bp, Artificial Sequence
  Description of Artificial Sequence: Synthetic primer
ttagccgcatcaattttttcc

SEQ ID NO: 2546 - DNA, 32 bp, Artificial Sequence
  Description of Artificial Sequence: Synthetic primer
tcttttaatttattagtaaatgtttcagaaca

SEQ ID NO: 2547 - DNA, 22 bp, Artificial Sequence
  Description of Artificial Sequence: Synthetic primer
cttctttaccaagatctgtgtg

SEQ ID NO: 2548 - DNA, 19 bp, Artificial Sequence
  Description of Artificial Sequence: Synthetic primer
cttttgcatcagcatcagt

SEQ ID NO: 2549 - DNA, 31 bp, Artificial Sequence
  Description of Artificial Sequence: Synthetic primer
tttagttttagtaccatttgtttttaaaatg

SEQ ID NO: 2550 - DNA, 28 bp, Artificial Sequence
  Description of Artificial Sequence: Synthetic primer
gattcaaataattttccaagttcttcag

SEQ ID NO: 2551 - DNA, 19 bp, Artificial Sequence
  Description of Artificial Sequence: Synthetic primer
ctgcttttgacaagacctc

SEQ ID NO: 2552 - DNA, 24 bp, Artificial Sequence
  Description of Artificial Sequence: Synthetic primer
tttaactgaattagcaagcatctc

SEQ ID NO: 2553 - DNA, 15 bp, Artificial Sequence
  Description of Artificial Sequence: Synthetic primer
ccacaacagggcttg

SEQ ID NO: 2554 - DNA, 27 bp, Artificial Sequence
  Description of Artificial Sequence: Synthetic primer
gatcttaattaaggtttttttggactt

SEQ ID NO: 2555 - DNA, 33 bp, Artificial Sequence
  Description of Artificial Sequence: Synthetic primer
ccagttacttttttaaaacaaattaatcttata

SEQ ID NO: 2556 - DNA, 29 bp, Artificial Sequence
  Description of Artificial Sequence: Synthetic primer
agaaatctttcttgacttatattgacttt

SEQ ID NO: 2557 - DNA, 39 bp, Artificial Sequence
  Description of Artificial Sequence: Synthetic primer
gaattttaagaaattttttgagaaaataaaaaaataaaa

SEQ ID NO: 2558 - DNA, 27 bp, Artificial Sequence
  Description of Artificial Sequence: Synthetic primer
tattctttaagagaagagcttaaagtt

SEQ ID NO: 2559 - DNA, 30 bp, Artificial Sequence
  Description of Artificial Sequence: Synthetic primer
aaattcaatttattaacggcttttgtaata

SEQ ID NO: 2560 - DNA, 27 bp, Artificial Sequence
  Description of Artificial Sequence: Synthetic primer
tctagcacccaattttgtttatattta

SEQ ID NO: 2561 - DNA, 29 bp, Artificial Sequence
  Description of Artificial Sequence: Synthetic primer
gtttaagcctacttaaagtctttaaaatc
